United States Patent Application Publication US 2026/0357256 A1 - sequence listing, part 2

SEQ ID NO: 9 - DNA, 58617616 bp, Homo sapiens (residues 2,171,024-4,342,046 of 58,617,616)
  source 1..58617616: mol_type = genomic DNA
tcgatatctgctgactgcattctccgcctcccaggctgaaaggattctcttccttcagcctcctgagtagctgggattacaggcatgagccaccacgcctggctaaattttgtattttttggtggggccttgctgtgttgccccaggctagtggtaactttgataagctttgggcctcagcctcaggctgtgtggtggggtctaaggtacagcaggggccccagaggagtcctccaggggaaggactgcgagaatgctgtggcactggcagagccttttacctggaggatccctgcattgagcccttctggtcccgaattgtactgagccctcttcttcctgcctgtaggctgaaagaatgaattcctggccctggaaggttcaaacagcagttctcaggggtggaggtggctctgcccccaggggacacctggtggcgtctagagacctttgcggttgtcaccaccggggtgggggaagcccaaggatgctgctcatcactcacagagcttggggcagccccaccaccgagggcgggccaggagacgccaagagctgtgcctttcatcgcctggggtcccgggcaccgaccgccgccgggtgtcgctccgtgttcgtgtacatgccttctcctgggggtagccctgcttttatttcctgagtgcttcctgggaccatgcatgtccggcaggccctggccaagatccaggcttgctgcgtgcagtccccgcccactgtgtccccctgagggaaggacctgaggtgaagttagcgtaatgggagtgtatttgggcctcgtttgcgggctgcagctctggagacacagattcaagtgcccagaatgtatgcgcggcagttacaagtggggcttcctggagaaaagaaggggcggcttttgcattggaatcacagaagtgattgcccggctccacgtccttcctggtatctcagactccagggacgtgaagataacagatggtcacattgtgcaaatagtgataaccttgtaggtaattcatcagctagtgtggaaaccccaggggaggaaagaaggccctgggagggagtgactgaaactcacttggaggctctctgggcctgtggagttctgcacagcatgcagctcccactcctcggacgcacttttcttttttgttttcttttctttccttttttttttttttgagacggagtctcgctctgtggcccaggctggagtgcagtggcgcgatctctgctcactgcaagctccgccttcagggttcaagtgattcccctgcctcagcctcccgagtagctgggactacaggcgcccgccgccacgcccagctaattttttgtatttttagcagagatggggtttcaccatgttagccaggatggtctcgatctcctgacctcatgatccacccgccttgggctcccaaagtgctgggatcacaggtgtgagccaccgtgcccggccagccacttttctttctttctttttttttttttgaagacagagtctcactctttttactcaggctggagtgcagtggcgccatctcggcttactgaaacctccgcctcctgggttcaagccattctcctgcctcagcctcccgagtagctgggattacagatgtgtgccaccaggcccagctagtttttgtatttttagtggagacggggtttcaccatgttaatcaggctggtctcaaactcctgacctcgtggtctgcctgccctgcctcccaaagtgctgggattacaggcgtgagccactgcgcctggcaatatttttcctcttttttttgaaataacatccttgttgtgacagttcacgtatcataaagttcacctgttttaggctggacgtgagaatggcatgaacccaggaggcggagcttgcagtgagctgagatcgtgccactgcactccagcctgggcaactgcgcgagactccatctcaaaaaaaaaaaaaaagttcacccgttttaagtgtacatttcagtgtgttttagtatattcacagattgtgcagtcgtcaccattgtctaattccagaacgttctaatcaccccaaaaggaaacgctgccgcctcagcagtcagtgctggtctcccctagcgtcctggagcgtttttccctgcatggaggcccacgagtcccgcgctttcctccttccctgtcacgctgtggctttaggaggcccacgagtcccgcgctttcctccttccctgtcacgctgtggctttggcctcaggctagagggtcggtgtctgtcagcctgtgctcagacgagggcgaggagagttctggtcagcgcgtccagcctccctcctgtgttgctttgctgctggaaaaagagggtcctgatgcagaccccaagagaggagagaactcgaggtgagccgcggatcacagtgagagcagccaccaagccgcttccttacacagcgggcctccctgacagagcagggcgtcctcggggagcaggcagagggtgcctgctcttccttagcgcctccgtctgtgagaaacggccagggttgcgagtaaacctggaacgtgcagacactcactggaggccagccgggtggtgccatccgaccacccttcaagcccagcctgctcaccggccctctcagtacagcgggcacgggttctgcgggctgcccggaagacctcccccagacccatagatgctctgtgtccttggtgggcagctcataagtgtgaaccttcccggtaccttgcgagtgcctcactacgcacttcaagacggggtcgctccggttgtgttttatgaaaccagaggcctggtgagctgagcttcctctcacagcttcacagcagcctgtgtgggtggcctcagccctcctgagcccctccagtgtcgagttgctttgactgtttccagggaactcctttggttgttgcgtagcttgggctgtttgtttgtttgtttgagacaaactctgtcacccgggctggagtattggagtttagtggcgtgatcataacagtgcaaccttgaactcctggctcaagcgatccttccacctcagcctcctaaagtgctagcactacaggcgtgcacagctgtgcccagccagctggggctgttgcacatgggctagttattatcaagtcagctgaagccttgtcagccatccttggtctgagctctccctggctctcgggcagcaccgtcttcctcctgtggaggtctgagtccccttttcacactgcccttgatcctacagacagatgctcagccaggaagcaacatgctctgatgtccaggcccagctctgctgtgaagtagctgcatggacttgggccagggcctgtgtggaccttgggttgagggtcaagtctaaaaatgctctgtcaggttgggcacagtggctcacatctgtaatcccaggacttggggaggccgaggcgggcagatcacctgaggttgggagtttgaaaccagcctgaccaacgtggagaaaccccgtctctgttaaaaatacaaaattagctgggtgtggtggcgcacgcctgtaatcccagctacttgggaggctgaggcaggagaatcgcaaaagctaagataaattttgtttttttctttttttagagatggggtcttgctgttcacccaggctggagtgcagtggtgtgatcacagctcactgcagccttgaactcctgggctcaagtgatcctcccacttcagtctcccaaacagctgagactacaggtgtacctgtcatgcccagctagttaaaaaaaaaaaaaagcaaaaactttttttgaagagatgagggtctcaatatgttgtccaggctgatctcaaactcctagcttcaagcagtcctcccgcctcaacctcccagagtgctgggattacaggcataagccattatgtctgatctctttttaagtttttaaatatatgtgtgtgtgtgtgtgtgtgtgtgtgtgtgtgtgtgtatatatatatttttttttttttagatggagtcttgctctgttgcccaggctggagtgcagtggcgccatctcggctcactgcaagccccgcctcccgggttcatgccattctcctgcctcatcctcccaagtagctgggactacaggcgcccaccaccacgcccggttaattttttatatttttagtagagacagggtttcactgtgttagccaggatggtctcgatctcttgacctcatgatcctgcccgccttggcctcccaaagtgcttggggattacaggcgtgagccatggcgcctggccgatattttgtatctttttaagagttgaggtcttgctatgttgcccaggttagagtgcagtgacgatcatgattcactgtggcctcaaactcctgggctccagtgatcctcctgcctcagcctcctaagttgctgggaccccaggcatgggccactgcatctggccaaggagataaattttcataacttatttaaccaagtataactggaatattatcattttatcatgtaattaaaaaattgttctggctggacgcagtggctcacgcctataatcccagcactttgggaggctgaggtgggtggatcatctgaggtcaggagttcaagaccagcctggccaacgtgatgaaaccccatctctactaaaaatacaaaaaattagccaggcgtggtggctgacgcctataatcccagctactcaggaggctgagacgggaaaatcgcttgaacccaggaagtggaggttgcagtgagccgagactgcgccattgaacctgggaggtagaggttgcagtgagccgagaccacaccactgcactccagcctcggcaacgagcaaaactccgtctcaaaaaaagaaaggaactcccacacgagctggaagccagcactgggctcttccgcacagaggctcccacccatagaccaggagtacgaacccaaccgtgctgctctagacatgggccctgggatgatcacccaacctctgtgtcccggctctgcctgtcccctgggctctccaggaacaggtctgtgctggaaacgcctcttggccgaggctgcttttactagacatccactctcagttgggggtcctccaggccctgcacacccacccaccatgagagggaatgtcaccgcttggcctttgggattcagaaaaacctggtgaagtctgcacaaagccctgtcccccagccctcggtccacacagcatcccacaccacaaggcacctctggacaggaggcagtgcgagcaagaggggacaggggcagtaactcggggtgcactgcctggtggggacactgtctccctagctgtgaatgacagggaatgaggcacaaggacgaaacaggcgtggggcagagggcacggctcgcgggagttgcagagcgagttcaccctgctactgcttctgcggggcactcatttttagaagtacacttacgtggcccccaaaataatgtcacgctgccaaggagagcaggcaagggcaggtgacaccgctgtcaatcagagcatttccagccctcacacctgtgagtcatctggctcccaggaacattctctgttccagtaaggcctgcgcctgtgagaagcgcttggctgaatcctaggaagggggacttgggccgacagccccctccaacctgcgcagcctcaggacactcaaaccacagctgcaaacactgccagccagacatgcagctcccgcggccaccactttgagacagcgactccctgtgacaagaaaactctgaaaccaggcgaggcagggccctctgtcagatgatcactggggaagacgctatggacagacaggaacttctgggaccacagcaggctggaattccagcttgaggagggagaggggaaccctgccgtgggccctgacagtgagcaggaggaaaggggtctcacagaagcaggaccccgatatgagggagcaggcccagcaccccttcctcccgcccccagcccctatccagagagcaggctggccctctgggtctcgcttcagatgcgtagaacccagtgcttccggctgcaccctgcaacatcccgcagcagtctgtgggggtccgcaggaagaagactcccccgtgagggggagctctgtggagcggcactgtcctgacggcagccactagccactcggctgtgggcacccgacatgtggctggcgggaaggagctgtgcagagcacagaacatacaggaaacgaccaggtgtgctgcactcgccccacacacgcagtcaaatcacgcaggaacaattttttttttttgggagaaaaagttttgctcttgtcgcccaggctggagtgcaatgccgcgatctcggctcactgtaacctctgcctcccgggttcaagcaagtctcctctctcagcctccctagtagctggaattacaggcacccgccaccacacccagctaatttttgtattattagtactactaacaatttttatattattagtggtaataatttttgtattactagtgatagagctaatatttgtgttattagtattcgccacgttggccaggctggcctcgaattcctgacctcatgatctgcgcccagctcgtgttgaagttctttagccacctttgagcaagggaccctattttcactttgtccggggcctgcaagttctgcctgctccctcgccaaccctcgccagccctgctctccgctctgcccagccccggctcttgcctcctcctatttctttttcctttttttttttgagctggaatctcactctgctgcccagattggagtgcagtggtgcgaccttggctcactgcaagctctgcttcctgggttcaagagattctcctgcctcagccactgagtatcttggattacaggtgtgtgccaccacacctagcaattttttttttttttgagatggattctcactctgtatcccaggctggagtgcagtggtgcagtctcagctcactgcaacctctgcctcctgagttcaagtgaatctcctggctcagcctcctgagtagctgggattacaggcacgcaccaccatgcccagctaattttttttttttttgtatttttcatagagatggggtttcactgtgttagccaggctggtcttgaactcctgacctcgagtgatccacccgcctcggcctcccaaagtgctgggattacaggtgtgaaccaccatgcctggccattttttttttttttttggtatttttttgtagagatggcgtttcaccatgtctttgggaggccaaggcagacagctcacttgaggccaggagtttgagaccagcctggccaacatggtgaaaccttgtctctaccagaaaaaaaaaaaaaacaaaaaatctccaaaacacacttcactttgaaattttttttttttttttttttgagacggagtcttgctcttttgcccaggctggagtgcagtggcgcgatcttggctcactgcaagctccgcttcccgggttcacgccattctcctgcctctgcctcccgagtagctggactacaggcacccgtcactacgcctggctaactttttgtattttttagtagagatggggtttcattgtgttagccaggatggtcttgatctcctgaccttgtgatccacccgcctcagctggcctcccagagtgctgggattacaggtgtgagctaccgcgcccggccacgcccagctaattttttctatttttagtagagacggggtttcaccttgttagccaggatggtctctatctcctgacctcgtgatccacctgcctcagcttcccaaagcgctgggattccaggtgtgagccaccacgccaacccctaaagtggttttagacttagaagaaagttgcaaagcaccgcacagactttctatgtggctttatttcatcacagtaccctgatccgaaccaggaggtggacggagctgtggcctcagtggcatatacgtcccatcccatcattgccatgagcccttgtgtctcctgtctcccctatctaggctgatccctcagtgcataaggaaagctgggggggggtctcctatggtctggcctttggaggagagccagctggggtctctgtgtggcacccctcagtcaggcttggctgcttctctcagggttatactgaggttctgcatcctggcaggagccccacagatggggttgcgtcccgctgggccttgggaggctcgtggcggctgcgtgtctcactgtgatgacgctggccttgtgtttcgtcaggtggtgtccacaggtgccctgctggttgctttttctctgccctgggagaggctcgctgaggctgcacggctgcctgggagaggctcgctgaggctgcacggctgcctgggcggcctctgacgcgccctgtggactgcagcatccaggggatcgcgtctgcaactcttattgctttggcgtttacctattggggatttaaaaaaaaattgttcatttttataaaaaagacatgggctggctgggcacggtggctcaggcctgtaatcccaatactttgggaggctgaggtgggcggatcacctgaggtaaggatttcgagaccagcctgatcaacatggagaaaccctgtctctaccaaaaatacaaagttagccaggcgtggtggctcatgccagtaatcccagctactcgggaggctgaggcaggagaatcccttgaacctgggaggtggaggttgcagtgagccgagattgcaccacttcactccagcctgggcgacaaacaaacaaacaaacagaaaaaagacatgggctctcgctgtttcccaggctggcctcgaactcctggctcaagtgattcgctccctgcacccagcctgttgtgggtttatatcagcacagtagcacgcagacgcgacgaaagtgcacgtgtcctggtggcgtgcacttggtctctgattctcggtgatgggtgtggagtcggagaggcttgggtggccctgctgggtgtgaacctgcctttgacattggccttgtagagggagcgaagggcagggtgctggacggggagggatctgtgttaggccaaggaccttggttttagttgtggcaggttctgggctatggcgaggccgcccacgtgggctagcccagtggtttttttcccatggtacagttggggaaacaggccccgtggaggctctatcacctgcggtcacataccaggcctttgccaacgcaggactcccagccaggctggagctccctggctggagcagcgtcgggagaattcccggtgggcctgcggagcgcggtctgagggacttgggctgtgttgagggatcaactgacctccagggaaaaaatggggagacatgtggagcggagcttggggcggccgtttgctttagggtgggagaggagcaggaccgggggccatagactccatcccaggccgctgcctgctcgctgcctgtagtaggacacagcgtgccagaataggtccccggcaaggtctgtgttcccttcgtggtccagggtctgggagtgtctctggtggtacccgctgggtggtgggcttgggagctgcaccagttgggaaatgaagagatgggaagttgacggcatcgcttgtccgggaagagagcgatgggctcacggggtggaggatggctctgcgtctcaaacttctctctctgtttcaggataaacatcacgatgctgctcatgaaatcatcgagaccatccggtgagtgcacggcctgcagtgtgttgtcttcacagccctgagccacttccgtggacacccgtgccctgcagattctgttgtggggatggctcctgcaggggtggactcctggaggtgttgtgaagcggatcaggggtgactcagggacgggtagagctgcttctcccagctccattcctggccagtgggtgcagaagtcttgagctgctggggtgtccagtgggtcctccaggggcgttgccctgccttcctctgtctccttgtcagtctccctgctgtgggttttgggccgaccttcaccctcacgcgccctcgacggcctcctgtgtctgtgccccatgggtgcagagaggagcattctgggggtgacttggatgggcaggaggcggaggccgtcctgtcctcgtaagctccagcctgggctccaggatctgcagcaacagtgcagggaggccctctgggtgcctctctgctgcccactgggaagctgcccatggtggccggcattctgcgtgtctcaggtgctcagggtcagaaccctcattgtgtggcacctgcacggaggccacatgtgtccatgtggccctggcgtcttgctggtctgttccttagcatactgggctgtgaggacaccgcccgtgcccatgcccagcatctgcccaggcctgcagctgccataagggccatgctgagctcctcttggccgggtggctctgtgccaggcccctagctcctgaggccctgtagttcagtgttggggcccagcggcacctccctggccaggttgtttgaggattaagtgaaatcgtttgtgtaggtcggccagggtgggcctgacccagggtccgtgcttagaatgtgggatctgcttttttttaatgtcatgatccgtggaccaggcagtggagtaggggcccctctgttctttgtaaaagaagtctggtgttatggttggagggagggctctggatcaggcagctggaccccagcccagcccccgcccagcaccagccccagccccagccccagccccagccccagcccagctgcagcatgcttctggcggccagccgcctctctctgcctgggtttctcttgttgcagctgggggccaagactctgctggcgtgggcctctgtgggtgctcctcacagagggccgggcagtctttttaagaatgctcaagctgtgcacggtggctcacgcctataatcccagcgctttggaaggccaaggcagggagatcgcttgaggccaggagttcgagactggcctgggcaccttggggaaaccctgtctctactaaaaaaaaacacaaaaattagccgggtgaggtagcaggtgcctatagtcccagctactttggaggctgaggcaggagaatagcttgaacccagggggcggaggttgcagtgacccaagatggtgccactgcactgcagcctgggtgataagagtgagactccatctcaaaaataaataaataaataaataaataatgctcagctgggcatggtggctcacacctggaatcccagtgctttgagaggctgggagggttgatcacttgaatccaggagctggagattggccgggcaacataatgagaccccaagtctacaaaaaagtaaaaaattagctgggcatggtggtgcacacctgtggtcccagctacttgcggggctgaggtgggaggatcacttgagaccagtggcgctgtgattgtgccaccgccctccagccaggcaacagagtgagaccctgtctcaagaaacaaaacccaaacaagaaagagtgctccagggctgtggcttcccggggctgtgactgtgcaggttctgccagtgctgcccagacgtggtctctctgggttaggatctcggtgcagcaggggtggaagcccctctctgaccaggcgcttgctagtgtgtctggaggtgctcagcagcaggggagctgcacctgctccccatgggaaggggcctgcacagacttctggggtcagaggagaccccaggcccccggatctcaggcagtggcggtgagagtgcctctctggctgcatgctcgccttctgcagggctcggagctgactgtcttgtttgaaccttgtgtgttttctggggagcgcatctggagtctggagcttaagcgttgtagggagcagggtccaggcacaggggcgtgcaccaacacctgggcatccgcgacgtaggcagagacctcgaaactcgaacccccaccacctggagaggctgctttctcccgtgcatccccagcatgtggccagggttctcacggtgtggctgcacagaccttttctgtctcacttcctctagaaacaccgacgacgttcttacacagcaaacaccattcagtccccatacggccagtgtcccaagcacgtcctcccacagtggtgttgtttttttgagtcagcgtctggctctgctgctcaggctggggtgcagtggtgccatctcagctcactgcaacttccacctcccaggttcaagcaattctcctgcctcagcctcccgagtagcagggattacaggtgcctgcaaccacgcccagctaatttttgtatttttagtagaggcgaggttttgccaccttggccaggctggtctcaaactcctggcctcaagtgatccacccgcctcggcctcccgaagtgtggggagggctgttgtttaaagatgattgggctgtcctaggctctcctcgtttggatgtccgttgagaatcagcctttccatttctccagaaaagctagctgggctttttctagaaattggtttgagcctgcagttcagcttggggaaaggggcgtttaaacagtgtcactcccaggtattcctgcttcagtgcttttttttttttttaaggcggagtctcactctgttgcccgggctggagtgtggtggcgcatcctcggctccctgcagcctccgtctccggggttcaagtgattcttcttcctcagcctcccgagtagctgggattagaggcgcccgtcaccatgcccagcaaatttttgtgtttttagtagagacagggtttcaccatgttgatcaggctggtctcgaactcctgacctcgtgatccgcctgcctcggcctcccaaagcactgggattataggcatgagccaccacgcccggcctttggtgcttttttatgtggcattttgacaatcctttgctgctagtatgtgtaaagactgctcccttttgcctatcggccatgcccctgctgagctctggcggtgtccgcgcgtattcctcagcacgctctgtggcgcagaaccacgggactgagtgaagaccgtgcggccgctcctttcaggctccttgctgctttgagtgtttttcttgccgagttgcgctggccggaacctcctggacagtgtgatgagaagtgactgcagatggccttgcttgggttgctctcggggcctcgctcggtgcctggggcttttgatgatctgcattgtgaggtcccctgccggtgttggccaggtgtgcaggcgttgaccatgctggggacgggtgacgagaggcaccaataatcacagagggcggatgccacagcccttctgacaggatgctgtgtctttcagtgtggaagggtcttggagggcacccggacctgaggtcaggtcctggccagctggttggggagtctggggacttggcgtggggtagggggcaatgaagctactctcggagttctgggaagctgcccgctggacttagcaggtcaagaggactggggagcagaggccgaacccccatccctccctgacccctcctgcagagccgcaggccaggtggctgcggaaggtgggcctgctgctgtcacagcggctcagtgactggtcccgtgccctttccaagcggaaggcgtgtccttccatttctggcctcttggagggtaccgtcctgatggcaccgaatgccgtcctgtgggctttccgtactcgcccacacggggctgctcagatctccgtccttgttccttcggtgaattgcagtgactaattttagagtgaagcagcttttcctccccaggaggtgctgtgtgtggttgtgaggtgccgctgcggtttcctcacgtttttaagggatagtggggtgtgttggtcagggatgttggtcagctgttgcctttcttgtcctttctttccagccctttgcgtctctatggttttggtgtcaagatgacgctggctgcataaaactctgagaaagtttctgtaggtttagtgtttgtcttgtcagtgtttgatggaattcaccagtgtgtttttgtattttgtatttttagtagagacggggtttctccatgttggtcaggctggtctccaactcctgacctcgtgatctgcccacctcggcctcccagagtgctgggattacaggtgtgagccaccgcacccggcaccagttggctttagtttctagtcagtcagttgcttttcgagctctgatgtggccagtgggtccctagaccagccctgtagcagataagttcacttaggtccccagagccactggtgtgtggcctcgaagccacgtaatacctgtgtgattcagtaacagcttcgtggtaaacatcgtagccttcgttttgaagtcacgcctcccttctctctccactttgagtggaggggtaaggatgtttgttttctgttggagaggatgcagtgtttaagaacatgcggggtaatactcaagattgtttacacctgtcatcccagcactgtgggaggctgaagtgggcggatcacttcaggtcaggagtttgagaccagccttgccaaaatggcctaacccggtctctactaaaaatacaaaaattagccaggcgtggtggtgggcacctgtagtcccagctacttgggaggctgaggcaggagaatcgcttgaacccaggaggcggagcttgcagtgagccaagatcacgacactgcactccagcctgggcaacagagtgagactccgtctcaaaacaaaaacaaaaacaaaaacaaaacacaaaacaaaacaaaaaaaaccaaacccttcctgatcgtttctgctgctgtgtttcagatgggtctgtgaagaaatcccggatctcaagctcgctatggagaattacgttttaattgactatgacaccaaaaggtaagcagagtcctgtccagccgctccgctccgaggacagactcggctcttggggaggacaggaggacgcatcctataattagctcttcttagatggtgcaagctgatctgaaatttccttttagagttggccgtggccaccataaagttattttggtaggaaatgtttatcaactcttggcaaaggctgtcagaggccggacagaattggaaactccggttgtggaaagtgggattggcatgtgtggagtcagcccgcgctagtgatcgctctttttatagcgggcggctgacggccagaagtccgcgttcctgcctgaggctgctgggagggcctgggcggccttaggctgcttggcagctctgtttagatctcagctgggtttggttagtccctctgtctccagccctgtggctgcgttagcaatttcgccctggcagctcctgggtctcggaggagggtcttgtgggtggagaggggcagggctgtctctggaatgcttgcttggaagtgttttgtttttctttgacaaggaagacattccaggctcatgcctttttcagctcttgagtctgaaatcaacagagtagtcctccatcaagggctgtgctgtcgtgagcttaggtgagcccctctccacagagagtcaagcccagagggccacgcggctgcactttacctggctctccggcctcactggcatgtgggagggactcttgtctggggtcagcggtctcagcctcagtaaacctcgagatcctgtgcccctccctcgagccctgcccattccctggtcagcaccctggtgccccacaggcagacaagcgtgttgctggcagggtcctgcgtgccgacctgctgctgtggatttcacgccacctgcctcgcatgtcggggcctctcgccaccccccctcattgggcgtgatggtgtgctgggcccttccctggtttagtatgaagagtgtgatgcagcgtgcagatcaacagccgcatggcagggtccacagggaggggcctgcagggccctgcacagagctctgtgtccgtggagttggggagcactaaccccaaagctctgcaccctgtgctttcgggttttcacggaggcttctcggagacttgcttgatgattgcctccatctccagtcccctctttctaagcttcttaccgcagcttgggctttacctcacccaggagccccccacaagtcgcttccttacaacagaagacactcctgtcacctagaagttcccagggatcaggagctttgttaggaactagagtcccctcggatgagtgggtgttgtcgggctgagccctttcacattaacctggggcagttatggcacctcacttgtgtgtggccagcttctgccttggctctgagcagcgagcgtgtcagacgctgtgctcacggcgcccctccacgtgggtgtgtggcgtccttcctcttcgcgtgggatgggcttagccaaggctggaaggacatcagggacaggctgggcagggggtcttcgttggagctggcagggccacctgagggaccgagccattagggcttcagaccaaggacagccccagctcctctgagcacctgcatttgcacagcctgccagggaagagtctcttcccaggagcgtgcagaggtgattttgggaaggtctggttgtcagggttgaaggcggcgtgtagaagtggaaacacaggggctgggcaccgtggctcacacctgtaatcccagcactttgggaggccgaggcggatggatcacgaggtcaggagatcgagaccatcctcgctagcacagtgaaaccccgtctctactaaaaatacaaaaaattagccgggcgtggtggcgggtgcctgtagtcccagttagtcaggaggctgaggcaggagaatggtgtgaacccgggaggcggagcttgcagtgagctgagatcgcgccaccgcactccagcctgggtgacagagcgagactccatctcagaaaaaaaaaaaaaaagggaagtgaaaagacaggaagggccagggctgctcctctggagctgcggggaaggcgggaggcagcaggccggctctgtgggttcctccggcccgcatggtgcctgctggccctctgcaccacctgggctccttccacccccgtgtccttcgtcctccggaggatccaggtcctgtgtggccgtgctcccggggctgtcggcaggctcttgttcttggtgtttgctcctcttaagttctcttgctttatcctatgcagctgctggttaaggaaaacatgaacttggcctgtggagcactggttttcctatgaggaaggggaagtgtgaacctcggcacatgcagtgcccaggtgaattcagggtggccagggcagggcaggaagagcatggggctggggctggggtgggagcaggggtgtgattgtttagccacgtctcggagcatctgccaggctcttggggttgccattgggaggaaactgcttgcgtgcacgtggaggtggcggaggacggaggcggaggaaagagtccccagccgccgccccccccccccccacccgcacaggtgcaggccccctcggcgctggggatgtggaagtcggattgttctctgggaggggccgtcctgggcactgcagggtgccgagcagggtccctgcctccatctcttgcttgcctcgccacattcctggggtccccggtgagagccactgtgtgtgacagtgttcactggacaggtacgcctcctcctcctgtctcttgctctgctctggacaccttctgaggtggagggacagacgctgttgtccacattttgccagtgggtccaacagacttggaagatgagcaagttatcccaggtggagactggacagactaggccaggcagaccccgtagcaggcttgcccccaccccggaagcccctctgagcccaggcctggctgggccgcgtggccggtgtttcttgtggctcacgtgccccacagacagtgggcactccctggagcacaggtgccccctgccctctggtgggctctgccccgatgctgttgggttgtgggcacttaggtaatgagggtttgccttgcggccagggcaaggagggcagagttgctgcggggggactgagtctcactgtggaccctgctgtgccgtgtctgacatgacacactgctgacgtgacacactgctgacgtgacacactgctgacatgacacactgctgacgtgtgaatgagttggagctttggaaggacacgctcacagagcagtgtgggtgggggtgaggcatcttcctttctgcagtgctcactcctcctgcacctgcccgggcagaggcctggtggtccctgggagaccccagccgttcacctgcctctggcgatggtggctgtccccagccagggcaaggaagaccctctaaggccggccccagggtttcccacttggggggctggcctcagtccccctcgagccctctttctctcctcacgcctccagcacacgtggacctcggctttgcgcgggagcctgggcaggtccagactgcctcagggctcagtgcttccctgcaccggactctcggccggccacctcgcttgtgtgtcaaacctgaaatctcctgcatcagggcggaaagcgaggcttctgccagaagggtcttggccagctggctggtggctgtccaggcagggaccacaccttggagcctgccttatccacatgctgtcccctcccatgcatgcggctggctcctgcccgcatgaccagggccttcccttgcctttttcagcttcgagagcatgcagaggctctgcgacaagtacaaccgtgccatcgacagcatccaccagctggtaggtggcttgcccctgcccagagggggttagtagtgccaggctcccggacccctccagaccccttatgtcaccgcctcggggcacagagctccccttagagcccctggggattggaatgtgcagcgtggggggacgatgggctgtgggtgagtggtgtgggggctgccgaggctgggctgtgtgctgtggccgtgtgccaaagcagagccgtccgtggtttgtgtgctgaggcagggccctgagggttgtggtgtctgcacacgcctctgcagccctgggttggtgtccgcaggtcccagcagaggcggggtccctgtcctccccgggctgtgtgaatgccggccttcccccttggacctcccccacaccgcctgccttcatcaggctggatgccggcctgggctgcacccttgggcaccccggtcctgctgtgtctcgtgaggctttcctcacagaggacggggcacacagtgagctggggtgtagcagggaggggaacgtgctgcttcccatgttctagaaagcaccgggggcccctggtgcatgggggtaggggagctctttcttgaaggtcttgctgtggagggagccctggtgggggtggcatgggctcacttggccctcctgagtgggactgggctgggctgggctgccccatcagcctgccacccggctctggcttcccctcaacctcatgcatgcagctctgtgggcccctgagagctgagctggcctgggcgagaggggaccacctcagcctgctgcagctggtggggaggaaggcggggtcccacgtagtcgagtcagatgaggtgtggtaggctcagggctttcacggggctcgtggcacctgacgggggtcccttggtgtcagcgccccaccctgctgccttggcccagaggaggggtggtggtcttggtggcctgtgtggttttggtggtcttgccagtggggagagaggcccgtggcaggaggtggagcctcctaggacccctctgagttggggcctgtccctggggatgctgctttactgcttgtaggaaatggggctgggttggaaactgacctgggagcccggcagccaccctgcagggggacgagaggccatgcagccgactccctgcttccgctgggaaaggtcccgggtcttggtggtggaggggctgggccgtgaggtttatgtgacatggccgggccaccctccgtccgcagtggaagggcaccacgcagcccatgaagctgaacacgcggccgtccactggactcctgcgccatatcctgcagcaggtctacaaccactcggtgaccgaccccgagaagctcaacaactacgagcccttctcccccgaggtgtacggggagacctccttcgacctggtggcccagatgattgatgagatcaagatgaccgacgacgacctgtttgtggacttggggagcggtgagtgtcgcccgccatgcccggctcctgtgcacttccaggccacacgctctgtgcctgccccatgcctgcttggagaagagtttatcagggacttgcgacgttggcgtggacagtgcttccttctcccagcgcctctgtcccgctgtggggccgttcctttccccagccctgaccgggctccacccagaggggagaaatcgcaggaacccagtggctcccagaccaggcccatcctcccaggtgcccggagactctgctttcgtcctgcttcccaccagctggggagctagacctgtgcaccctctactgctcgctcccagaagctgccactcgctagcctgggccccagcccgggccccacccacggctgcagcctgccgcagtccttccctgggcacacctgctccctccacagcggctggaaaggtcccccgcggaggaagaccccaggtccctgggctcccggaggccctcgcgccctccctgcatccccagtctccctcggcacccctgcgtctgggccgtgccctgcccctcccaggttggggctcccacctgctggcattctttcagcctctgcctgcactcagactctgcttgtgaggtgtcgtctcctctcaaccacgggcggggctccttgaaacgaggccctaggtgtgtcttcagcagcagcgtggcctggctgaagcacagatgagcggcccgtacacgaacagcctcagtagcctgacgaattcttgataggaccaccccatccaggctgcagggctgacggggccacccaagggtcagacagtgaaggccccttctccacagtgtctaggctgtccctgggctccttggacctcgatggacatgtgaaccttgtgcctgcaggcacgcgagccccacgtctgccccctttccacagtcctggctttgacgtggggaaggggccccaggggcagggaccaagaggactttgcacagactgggtgtggcagctcacgcctgtcatcttagcacttggaaggctgagatgggagggtcacttgaggctaggagttcaagaccaggctggtcagcatagcaagatcccacttctgtttatttatttaaatttattttcaaatttaaaaaatgcaataaaaagaatgtgtatcgtctggacgtggtggctcacgcctgtaatcccagcactttgggaggccaaagcaggcggatctgagctcctgaggtcaggagttcgagaccagcctggccaacatggtgaaactttccctctactaaaagtacaaaaatcagttgggtgtggtggcgcgcgcctgtaatcccagctacttgggaggctgaggcaggggaattgcttgaactttgaaggcggaggttgtggtgagacgagatcgcatcacggcactccggcctgggtgacagagtgagactccgtctcaaaaaaaaaaaaaaaaaaaatggggcatatctggctgggctctttggctcctgcctgtaatcccaatgctttggaaggctgaggtgggaggatcgcttgagcccaagaggttgaggctgcagtgagccaggatcacaccactgcagtccagcctgggtgacagaatcagaccctgtctcaaaaacaaaaaattaaaaaggcttatatgttttagatgatgacggcctagcacttgctggccgggccctggccccccgtccctgtgtgcttctcttcccactggtgtggtggcggcggtctgtgcccattgtggtcgctccatggttcatgcccgttccctggagcacagagctgcctagcaggggaggagaggtggcttgacacccccggtgtgcgccgctgcctccaccctcctgacgctggcgtatctgcagcccctgttccctccttctcccttagagccgggtgttgctgggttgtgtgctgatgctgtgaaaccgcagcggccgggagactgtcctggctgcgggggacccctcactgcctctcccaccctacattgagcctcagtcagatcctgctcatgagccttcctggggtgccataagattttatcagccaggttgctgtgtgtctgtgtgctggtgacgtggggataatttgaggtggacggcagcctttccagacctgcaaagtcttgggcagccctgtctgtctgaacagtgaacatcacatagggccctgagactcaaaatggattctggtttcgggggccaccaagtgatgtccatggatgacgcgttgtgatgaccgtcccctcgtgggggctctgtcaggggcctggtctctgggaaggatcctgagtgaccttggagcatcggatatgtgtggagactgtggcctcccctgtgggtcttcatggccgcattcttgtggcctctgtctccgagcctagcacggcctcccgggtggcatctgagcgctgtgtggtatctgatggatctctctgatcataggtgtgggccaggtcgtgctccaggttgctgctgccaccaactgcaaacatcactatggcgtcgagaaagcagacatcccggccaagtatgcggaggtgagcggatctgagggccagggtgtgttggaggcaggggaccatcagagaaagtgacgccctgggtgcctgcaccccactgctgtgggacttccgagtctgggtggcgttctttccaggcccaagacgtcttggttgcctgcagcgtgtgcctgtgaatagggtgcccgatcgccctcacggcccattacaggccggccctccaggcctgtccaagcgctgcaggggtgtctcggagcctgtttcatggcacgtgccactagtgaggcgagaggtgctcagctctacctcgtggcacagccctccgagaagcggggtgttttgggtggcctgcccaggcaggcgcattgaggccctgttgctctgagagtttgttgttgtttttttttgttttgttttgtttttgagacagagtctcgctcagtcgcccaggctggagtgcagtgactcgatctcggctcactgcaagctccgccacctgggttcacaccattctcctgcctcagcctcccgagtagctgggactacaggcgccccccaacacacccagctaatttttttgtatttttagtagagacggggtttcaccgtgttagccaggatggtcgcaatctcctgacctcatgatccgccctcctcagcctcccaaagtgccgggattacaggcgtgagccaccgcgcctggcttgccctgagagtttgtaacgggcgtttggtttctttccttccagaccatggaccgcgagttcaggaagtggatgaaatggtatggaaaaaagcatgcagaatacacagtgagtgccatcgctccgccccggctcccatcgccggccccacccccgctcccaccctcctgtcagcccctcctttcttgccgatgttggcacatggctgttggcacatggtgtgccccctggagtcccctctggttctcgtagggctgcctgggcgtggcgtctgagccggcagcaggcgcctctgttggtaccgtccctctcgtcctctctgacatggcttctgtccctcggcagcatgcggtgcacagaggtggtgcagggaatgggcttggggctccatggagcggaggcctgtgggacaggctgggttctgggctggctgcggcatccttggggtgtcatccctcactggggacagccttgtttggacgggttcctggtcctcagtgctgtgttcttcatgacaagccagcaacctcggggtgggcagtgttctctcccgccctgttgtgatgcagtctcaggtgctcctcccatggaccctggggatggcgtcgcgtgtggccctccctgtagggtgtgcgctcccctttcagtggctgagtggcagtgggatgggtgtgggggtgggaaggggatgctgtttagggagcaggaaggacagttttcctgacccaggttgggtgattaatgggccatagcttccaggagtagccaccactcctgcatcctcctgggaactccttcccaccccacgctgagtccttagacaccaggctccgccctggtcctttccacacagaggcctgcagagctgggtccttccttgacctgtgtgctcctcctcacagtcccagctgctcaggcgctcacctgtggtggaggctgatggcgccccgggcccatctgctctgtctcccagcgacgtcccagacctccccgcccttatggggtgtgggcttggtgctggtgcagctgctcccgtgatgtggattggagggtggcttggggtctggggactgcaggaaggtggatgcttcctattctagacctggagcccctggagtacagagcccgcagcccctcgagcctcagagcccgcagccccttgagtcctgagaagcttcccttataaggcagaaggagtgctgggtggggcgggcaccaggtcaccaccctgggaggacgatggcacaggggttgccaagctgcccagcagagcggctcaggatggaacatggcaaggccaactcgtgatcccaggtgcctgcgacgacccagttcctgggtggaatccgcaagtttgcagaagcaacagaaacaaagtgttcaggggtcctgttgtcattcgactctcacagttcagagggatgcatgagggacacaggtggcatacagttccagtcccctcccaggtggtgcccacccctcactgtctcctcagcagggtgcgtggaggcgtggctggggctgtgtgcccgcccgtctgcctggagctccctgctgaggtgccctctgtgggcctgtcagccagggccttcctcggatcgccgtgaggcctcgacattcctgtcattgccacgagtgggcgtgcgtcctgcctagcacgcgcccctgtccccagctcagacccctccgcactgtcccacagcacaagtgaaggccggtgtcagggtgcagggccccgatccctggtggccccgaccggggtcaggagcccttgccaactggctctgccttgggcgtcctggctgtggtggtctggcagatgaaccttttggaggatcacttgagcccaggagttcggacacattttttttgtgcatgtgtgaaagaaagtcttgttctgtcgcccaggctggagggcagtggcgcaatcttggctcactgtagcctccgccccctgggttcaagtgattctcctgcctttgcctcctgagtagctggaattaaaggcgcatgccaccacgcccggctaatttttgtatttttagtagggatggagtttcaccatgttggtcaggcgggtctcaaattcctgacctcgtgatccgcctgcctctgcctcccaaagtgctgggatgacaggtgtgagccaccgcgccgggcctccttggggtttcctacgttgacagttgtgtcgcctgcaaacacggagctttgccttttccttagcagtccgtgtgcctttcctctccctttcccgtaccctcgtgctggccggcgctggcatttcccatgccatgtgagtcgtgagggcaagacgggtacccttccctgccctggtcttggcggtcagctgagcccctggccgcggagcacggtgttagcggcgggctcgtgtggatgctctccctcgggtggaggataagcccgtggtcctgagtgtgcagcgtgcgctttttcgttgctgcttctagtgtcagcgcggtgctgtggtttctgttcctcaccccgttgctgtgatgggtttccagtgctgaacgcgtccgccttggtcggcgtgcgattctgtttatccaaggtgggattctgctggctgatgggccgctgaggggttttctgccgtggtgggagccgtggcctgcggtgcttccttgcggccacgcctgtctggtttggtctctgggtggcgctccctcggcttctgttctgctgtctttgaccaggacttgcgcatccagggctgtgggcccggctctccttccctttctcatggtgattgttcccaaatgctgtgcccacagtggaagctgtgtggtgtcctgggttctgggtccacttgcactctggccggaagttcccacatgggttcctggctgtggcaggcgagccacacagatcccagcacagaggatggaagccctcgccatggttcccagcgatggccaggagggcgccatggtgccttcctccgcgcggtctggctgggctgagccttgctcaggagaggggtgctgtcgggtggtggggctgccgcagcactgctcccccttctgcctcatcttgtcagcgtctgggtcagcaccctgcctcctggggcctgggtccatgacacggctgagcagcatggtgtctagtgtggcacaggtgctcctggcatggagctgcgttcgtggtctggattccgtgcaggtttaggtgctcacggtcaggccagtggctcctgagatgtgtctgggagcatgatttgggggaaagcgtggcattcttcgtggctttggcaacacgtgtcagaaagaacctggtggtggggaaagcaggtgtcagtaccagcctctgcctctggcatccgtcctgtttacagccaaccctgctgcggagggtgggtcagagaggcttccacctgactgttccctgccctttctgatggaaacttgcatctgatattggaggaaaccctcggagcaactctctgtggctttgcctgtgctccacttgggaggctccaagtcctcccgcctgagcagtgtcaccagggaggctcctagagacccagacccccgcttcctatggggccggcatttcagactccagagggaagcagggttgcatataaaccacggtgtttgcaggaacagcttcggccccagagcccatcctgtcatggagcgtgggggaccccagggagggttcccagccccaggcctgtgatgcgagcccggatctgcttagtgctgctcaggacttgggatttgagtcatttcctgggtggcttgttcacggggaatgagggatgttcagagggtctgtcaggtgtggagagggaggagacgggtgtggggggtggcccagcacctgcagaggctcaggatggctcgcctgcgcacctcccatcccgtctcctcccctcctgggggcttcccgcggccttggagagcggaggatgtgcagctgctcctggccggggcgggtggccctgccctctggatctgcgtctgggtggacgagtggccctgtcctccgggcccgggggggtgtccctgtctctctggggctgagtgggtgggccaccctgttgcttggggcggcggcttgcttgcgttaccctctctgctcggggactccgtccccatcctgagagacgctgggtggggcgcgaggcctgtggctgttgtgtggaaaggagtgtcgctggtcctccctcggctcttggggtgctggtgtgggcttctgctgtggcccaggtgccctcacccccaactactccagcccccagcatgaatccccttcctgtctctggatgggcctgtcccggacatttcacagaaacaggatcacacactgcgtggccctctgtgtccggcgtctctcactgagcgtggcgtcctcaaggtgcatccgcgatgtggcctgggttggagcctggctcctgttctcattggggtcctgcttccaggtgtgcgcggcctcgctgtgctgtgttgatctttcatctgctgatggacgcttggctgcttccaccttttggctgtgatgagttgtgttggcttttggaggcatttgtgtccgggcttttgtgtggacatgtttttatttctcctgggaatggaggtggtagtgtttttgaaggatttgaaaggcggtgtcttgattgtccagatgctaccgtgttggacagctaggttaataagaggtgttttctcctggacggtgccaggtcttgaggtctggaggtggactggcgtcgggctgcagctggccttgctgtgagtgtggcgtggagctgtggggacagcgctgctgttagcaggccgtcagcggtgctcagggcagacgcccccagggactggcggctcagcttccctgtgtgcgtgtttcttgtggttggtgagggagggacagagctcggcgctaggctttctcagcctggccgagtgtcgctgcctgccgcagagggtgccccccagcgccctgtggcctccctcaggccctgcctggagcccagcatggtggggactgcaggccctgcctcggggcgcccctgctggccgcctctggtcctgagagtggctgcagcccctgattttgagcttacatttctaggagactgcagcgtggcttgcaggtgtgtgttggtgtggccgcagtccccttggctgggcctggcctccccaagcggatgctggagcacgaggacctgtcccggcttctcaggaggtcctgcccgttctctgcgcatccctctcacggacccttctgcctgcagctcccagggctgcagccggtggggcctgggcctcctcctgctccttcactgcaagcggagctgtgttcattccattctttcttcacaggggctgggcgggctgggagtgccagggaggccgggggtccgcgctcacacctgttttccctttcagttggagagaggcgatttcctctcagaagagtggagggagcgaatcgccaacacgaggtatggccagcgtggggcatgcagggcatgtggggtgtgcgctcacaggcgggcggtggccatggcaccggggaccgggagcggcccctcgctcctgtgctggctgtggcaggaaagaggccggtggggacaggaagggcgcctttccctcacgctgggtctccctctgcgggcgcgcagagcagacgtgcccagcagagcccctgtcggccctgcagaccctgctggcagtgagcccgttcctgctgcctgtccccttgactttgggacactgtgggcccctctcgcctggtttcctgggcctcctccccgctcaggcttggtctgggggtcttcctgtctccatccatcccttctggagtggctggcacccacacagcactatgagggctgctcgagggagcggcccctcgtggtcccaaaagccatctctgcactgcctgggcttgcccctccgcgccacctcgcacccaggcctgggagctcagggcactgtccaggtccgtccccaccgccacctgtttgtcctggtggccacgggctctgtatggttgggctgggcccccgtgctttccactgcccagcctgggtgtggccacagcactccagcgtgtgccagggaccctggaggcccaaggcgcttgtgagggcagccggggaggtggggtcagcagccggctgggccctgctcccccagtcccgccatcctccctgctcccctcatcctcccagcactctttgtcctctctgcgcccctcgtcctccccacattcctcgtcctccccgcattcctcatcttccctgtattcctcgtcctccccgcattcttcatcctcccctcattcctcgtcctccccgcattcctcgtcctccccacgcctctcgtcctccccgcattcctcgtcctcccctcattcctcatcttccctgtattcctcttcctccccgcattcttcatcctcccctcattcctcgtcctccccgtattcctcatcctccccgcattcctcgtcctccccgcattcctcgtcctcccctcattcctcgtcgtcccctcattcctcgtcctccccgcattcctcgtcctccccgcattcctcgtcctccccgcattcctcgtcctccctgcattcctcgtcgtcccctcattcctcgtcctccccgcattcctcgtcctccccgcattcctcgtcctccccgcattcctcgtcctcccctcattcctcgtcctccccgcattcctcgtcctcccctcattcctcgtcctccccgcattcctcgtcctccctgcattcctcgtcctcccctcattcctcgtcctccccgcattcctcgtcctccccatgcccgtcatcctccctgtattcctcattctccctgcattcctcgtcctccctgcgcccgtcgtcctccccgctcccctccttctccctgcattcctcatcctccccatgcctctcgtcctccccgcaccctcgctcctgctgtcttccctgtgctcttcttcctcgggtgtgctcgtggcttgtggttgagtgtcccccatgggcagggtttggggaacaagtagaaaatgggggtttcttttcccaaaagtttcctaggttcgctctcctgtgtgaacttccatttgggttggggtgctgtgcccgccggcgggtgttctgccatctggagggaatcgtgctgaccctgtggtgtccccatcccatggggtggtggtgggagcgcagggggacccgcagtggtcaggccgtgattactgtcttataacaaactcttaagaagccgagagatttctggcgtcccgttgacatctgggctcggcccaggctctcacagttcctctccaggagctgccagcctcgctgccttgtcaggcagccccagccctaggctcagcctgctctggctctgggcacagcgtgcaggtcttgaccaggagggactcctcccacaggctgcccactggttgtgggatcttgcactgtctctggcctcagcctgttttccctttcctgggtctgactcacgatggtggtggctttggaggtgtgcatcacggagcttccttccctgaacacccagttacccaggtctttctggctcacaccgctcagccaccttggccacctgagctcagccgacctcacgtctagcctccctaagtgcggtcctgagtggggaacacgggcagcccaaggagcctcgtttgaggatgcctggcctgggaaagcagtgctgggcctgcaggggagcctctggttcccctgtccttgccagagtgtctgaaatgctgccaagggcgcctcacctgggacccgttgtctgcggtctctgcagcagttgagcgggagcctctgcttggcgccccctgttgcagtccagccccgtgctgggcctctgtttttggccacccaccttcttcccttggcctgtgggtacttcacggctgctcttcccaccttgtgtgggctgcttgtgaaccttcccagatcactggactccaagattcacaataagagacttggtcacgaatcctgccccctctgtttttggccccactcagaagaggctgcagttgccttttccctgcacctgaaacccacggcgtgcgctcagctgcgtgggcttggccctggaggtggcgggcgggtgtgggcagggcctagcaccgacagcagcggttgttggctgcgccgggtggctgtgcccgtgagacgagccttcatggcactgaactggagtattgttttgcagtgttatatttgtgaataattttgcctttggtcctgaggtggatcaccagctgaaggagcggtttgcaaacatgaaggaaggtaaggcgccctcctcgccggtctgtgctggtgtgacatgattgaggaagggtggccaggaggtccccgcagggtgtcctgcagaaggcagctcagacttggggtcttcagtccccttggagccaggtggtcttcctttatgcttttttttctttttttattgagacagttttcctctgtcacccaggctggagtgtagtggcacaatctctgctcactgcaacctccgcctcccgggttcaagcgattcttctgcgtcagtctcccgagtagctgggactacgggtctgtgccaccatgctcagctaatttttgtttttattttattttatttattttttgagacggagtctcactgtgtcccccaggctgtagtgcagtggcgcgatctcagcttaccgcaacctctgcctcccgggttcaagcaattctgcctcagcctcccaagtagctgggattacaggcacatgccaccatgcctggctaatttttgtacttttagtagagacaggatttcaccatgttggccaggctggtctcgaactcccgatgtcagggtgatctgcccgcctcggcccccgcaaagttttgagattacaggcgtgagccattgtgcccagccctggaatcttcttgagttgagcctacagcttgcttatggccagctgaccacccaggggcaagagtcccctttattcttgacctaagcacatggaacttggtgtccatactgagcaggagtggggctctcagctgttttgttttctccctccggagaaaggtcaccaggcccatgcagggcccttcacgctgttttctgaaccccaagccctggcgtagtttcaggagcggagaactcagcccatgacatcgattccagtcctgcagtcgagggtggtacccagaccacactctgtggactgcccattccctaaacatggagactgagcctgccattgtctcccagcccctgccagccctccagcaggacatagggcaggtttggggtcttccttgaggggattgtgctgcctgccttcctaggctctccaccaagccctgcagcaagcaccacctcatctgtatcctggcggacgtggcttccagagccactgctgggctcgaagacaggcgctctgggggtaccccctcttcctcccaactgctccccacctgtcctctctagggaggcctccagaggctaggggagaactgcggtgggctcctcaggcctcccaaacaaaacccagagggtctgcagctgccttcagcaccaacgccccacaacctgggggtttggagggtgcttgtgtgcctgtgtctgtgtgtgcgtgtctgtgtctctgtgcatgcctgtgtctctgtgtgtgcccgtgtgcctgtgtgtctgttagcgtgtctctgtgtgcgtgcctgtgcgtgcctgtgtctgcatgtctgtgcctgtgtgcatgcctgtgtgtgtgcgtgcccgtgtgcctccgtgtctatgtatgtgtctgcttgtttgtctgtgtgtgtgcatgcatgcctgtgtctctctgcgtctgtgtgccttgggagtttgtttgcatatctgtgtgtgtgtgtgcgtgtggcagtggtgtttctgacttatcttagaaccacgtgaggacaccatgcttccccgcccagtcgcccccacaccccagcagcactacgggcctccctgcaccctgcagctgcatgcaggaaggcagcagtggcttcaggcagctcctgtcaccccctccatggtcctcgtacccgctgccctagaacgcctcttctggctgtttctcgccagctttctctgcacgatcagacgtggtggctgagtcagggtactgcagtggcgtcttctgtccggcccctccctgttttgaacatgtccagtgaagggcaggtggccagtagtgctgattctaggggccttgatggtcccagacatgcccatgagcatttgttagcctggctctgcaaccattagacgtggccctgctcatgtttgaggtcctctggtagggatactggcctaacctgtgtgcccagcctggccctggaaccgcccttcctgctcctcctgaggggagtggtgtgtagaatgccaggcctgggctggtgtggcgtccaggggaggagagctgggatggcggagtgtgcatgtgtttaaatggatccactttgacttttaatttttttttttttggagacggagtctcactctgtcgcccaggctggagtgcagtggcgcagtttctggtcactgcaagctccgcctcccaggttcacgccattctcccgcctcagcctcccgagtagctgggactacaggcgcccgccaccacacctggctaatttttttgtatttttagtagagacagggtttcactgtgttagccaggatggtctcgatctcctgacctcgtgatctccctgcctcggcctcccaaagtgctgggttacaggcatgagccaccgcacctggcccacattttgacttttatgattaccttctttatatgtgtaaaaacagaaggctctgtttctctcggtcctgcgaagttcggctcctgacaccaagttcttcctgcagcacacacaagatgccccatagtggctggtgatagtgagactgacgcttagcagcagccttgcaggtgcctggctgacttttttgtatttttagtagagacggggtttcactgtgttggtcagactgaggctgaaggtgtccatccggtctgtttgtctttgcatttatcactgacagtcagttagaatcccagggttcagaggtatttgaaataattcttttcgcatgactgtttccagtttgcatctacagttagattttgttcctgcttgtgtacggcttgggggtttgctcttcctgcctctcaaaccttagttttttgttttgtttttttttgagacagggtcttcatccttggcccaggctggagtgcactggtgtgatcatagctccctgcagccttgacctcctgggctcaagtgatcctcctgccccagcctcccgagtagctgggatcacaggcatgcaccatcatgcccagctaattttttattttaattttttgtagagatggggtctccctgtgtcccaggctgggctggaacttctggcagtctgcccgccttggcctcccataatgctgggtttacaggcgtgagcctgtgcgcctggcagcgtagtgggttttttttttcttttgaggcagagtctctctctatcgcccaggctggagtgcagtggcgcgatctcgactcacttgcagcttccacctcccaggttcaagtgattctcctgcctcagcctcccgagtagctgggattacagatgtgcgccaccacacctggctagtttttgtatttttttagtagagacacggttttaccctgttagccaggctggcctcgggtgatccacctgcctcagcctcccaaagtgctgggattacaggcatgagccactgcaccgcgccgagaatgttttttaaagaagcattatttgtaggaggttgggcgtggtggctcacttgaggccaggagttccagacaagcctggccagcagggtgaaacccgctctctactaaaaatccaaaaattagccaggtgtggtggtgtgcgcctgtaatcacagctactcgcaaggctgaggcaggagaaccgcttgaaccagggaggtggaggttgcagtgagccgggagactctgtctcaaaaaaaaaaaaaaaaaaaaaaagttatttgtagaataggcttcaacttggaaggtgtttcctagtgttgcttgtaggcaggtggacaggacccggagcccagtgtgtgtgtgttccgtgtcattgttccttctctgtcaccttgagtggtgtctgctcttctgtttcctctctcctgtgtggcagtaagcagtgtctgtgtttcaggtggcagaatcgtgtcctcgaaaccctttgcacctctgaacttcagaataaacagtagaaacttgagtggtaagaaactctcatgttgttaatgatgaacacgggtaattttaaccatctgacacgcagtattcctaggtccctcttccttgaccctgtggacactggggctggatccttctgtggggtggggctgtcctgggcagtgcagggtgctgagcagcgtccctggtgtccacccactccatgccaggagcacccctggtcgcgacaaccacacacgtccccatagagcactgtgtgccatgggggtagaatcactcctcggggagaccccggcttcgaggggaggcgtgaaggatttacaggacttttgtggacagagacaggcccacggtgggaaggagccggcccctcccatgccccctgcctgccttactgtgctgcgtgctctgtcagctcccagccttgcggggcagcacggcctcctctgaggggcttccctgaggagcgcccacccgggaggtgcctgtgttgctggatgctggccgttcttgcagccgtgatctaagtcgcttccagatcttctccccctccttttccattccactcagctgggtttgtggctgtttttctgaggttggaggggcccaggccaggtggtgttgaatggtgcacctccctgggccggcctctgtgggccactgtggcctgacgcagtgtgggagaagagggaagacgcgcagctcaggcttctgtccccacgcctgccctggggtgggtgaggtctgcatggaggggctgtgggcaggcgcaggccccggcctcacctgtggctcctgcagacatcggcaccatcatgcgcgtggtggagctctcgcccctgaagggctcggtgtcgtggacggggaagccagtctcctactacctgcacactatcgaccgcaccatagtgagtatctcgctgcgcctcagccgcagggccgtcctggtcttccaccccgcccacgtcacactgctctctcctttctcatgtggcctctgagaccctcccctcagagccctcaacgccccccggcccctgagctcaggcccagctcctcaaggcccctcagtactgcttgcaccgcaggacccaccagggtcctcccaggcactgggcgtgtcctgggtgagggctgagtgctgtctcccctagtctacgctcagctcctggggtggggcggggccatcagagtgatgtgtgaccataagggtcccggccgccatatccagaggcccctgtggataggagtcccacgtccctgttcccagcttcctccatgtgagagggtcctgagcggggagacaccagggtccatgggtggggtctgggatgcttcttccctccctgtgttccccagggtcctctgacacagccctgggccagtgtgcggcctgcctgcctcccacggtgcttcccccccgggcacgagtatcccgagcctcctggcatgtgggcagcgccagccctccagggctgggaggcttcccctggtctctttcccgtcctttggttgggcactctgttcctgttgttggggtagcggtggttttccttacggtggtgctggtgtgtctgcaccctcactgtccagtgctcggagcctccactagagcctgcctggggagcgctggtgccgtctggggaccgacagccccaggcagatgcaccccgccctcccactgctcccccgagggccctgggacgagaggcatggtgagctgaggctgaggctctgggggcttggcctaccgtgcggcccccacctccacgcagtgctgctgcttcagctgccctggcactgacgccctcggcgcagcctctcgccttctcctctgaggcgggcgcggttcttctgtgcagaaagccctccctcttccagaagcagagacacatcccagggccctgtgtctgttctgaaggcttaaaccagccccgcccacccgtcgcgtgctggtgaattgagggtgacgcctggccacagctgggttagtcacatccgcgtttgccactggggggctctagctgcatgcctgctgtccccagataccagaacagcctccccagccactgtccaggttgctgttgttacctgggtgtccagacaaatccgaacagagattgggactcccttctaatcagggttctctttcttctttttagcttgaaaactatttttctagtctgaaaaacccaaaactcagggtaagtttgtgtgttttttctcttgggttaataacacgcatgcactgatgtggggaaatgcaaagccgtgcgcagccgggttcaggagccacgactggagcacagccctgccgcccctcggggcccggccctgtgccctttcccgcctccttcctgctcctccccactgtcactcctggtcctctccctaccctttcctccctgtcctccccctcttcctctcctctcccagcccttttctctcaccattcaatctctctctctctcccccaccctccctctccgtttctctctctctcccaccctctctctgtctctttgcctgtcttcatgctttgccttgtctttgatggtttggcctgggacatccttccccttgttaatacttatttttggggaggtggcttggcttagttttggtggtggggtgagttgcactgaagggctgggtgggtgaaaagcttgtgcgtcactgctggctgccccctcttgaggcctggggggccacacatgtgcgcttgtcccaccctcggtgcagagtgcagctcctgggcccccgcgccctgcacgcgctgcaccgtcggaggcagggctgtcccctcctctcccaccttaaagcagcggtgggaaagcctggcttggggagccacagtggccgccctgcccgctggcgcttctgcagcctcagacctgcctgcttatttgccaccaaagctgagaggatgtttgtccgggcgtcctttccttttggagggggtcagacaagaccagcatgcggagaaccccgtacaggaagggctctgtcactgcctggatttgtagccagggctgggctccaacccggcctcagagcctggtacccctcgggggccctctgtccttcccaccatgcttagggggatgtgggtcttccctggagagcagggaacggcccgaggtggccggcgcaccctgtgttccccttcccgtgggtcgcgccctccactaactcacatcagagaacttgtgcatggcgtcccatgtgtgggcctcggtgcctttcgaagagaggagagagggcaggggaggctgtgggctgtggcttctaggtcctgctgcctgaggggcttctcgtctcctgtcttggatgtggttctttttctctgtggctcacagtctggcttcttactgacaggcatctgtgattgtgggagtggctgtgaatgccgttatccgtgcccacgggtcacgtcctggcctgcggggccccaagcagcccactgctgtctctgggcctcagtttcctgatttgtgccacagaggacttgcagtggacagagttgggcccgtggcccccttgagtctgagctccgcgtgcctctcggtgcaggagggccgtgggcagcgctggggcttcctgtggctcaacctgctctccttccaggaggaacaggaggcagcccggcgccgccagcagcgcgagagcaagagcaacgcggccacgcccactaagggcccagagggcaaggtggccggccccgccgacgcccccatggtaaggccccagcctggctcctgctgctggagggcacccgccccctgcccgggagaccccatgggtgggaggctctgtgcccatccctgttcttcccttgtgtcctccaggactctggtgctgaggaagagaaggcgggagcagccaccgtgaagaagccgtctccctccaaagcccgcaagaagaagctaaacaagaaggggaggaagatggctggccgcaagcgcgggcgccccaagaagatgaacactgcgaaccccgagcggaagcccaagaagaaccaaactgcactggatgccctgcacgctcagaccgtgtctcagacggcggcctcctcaccccagggtgagccgcccccacgccacggcccccgctctccccgagtgcggatgcctggggtcccctctgctgggacgctgccctcctgagccccgtgtgttcagggtgtccctggagcctccctgttgtggctgtgccttcagggtggccccatcctaaggggttgctgggcacctgccccatgctgacgcctctgcccaccgctctcccgacccgccctgtgctgacgcctgccctccgctctcccagatgcctacagatcccctcacagcccgttctaccagctacctccgagcgtgcagcggcactcccccaacccgctgctggtggcgcccaccccgcccgcgctgcagaagcttctaggtgagcccgtgtgaggcgtccggcgaagggttctgggcttggggtcatcccaggaggaccgtgggttgtgacgctgacctcgcagcagcccccgtgacctccatgctggaccccactgaagtttacccagggttggggtctgcctgctgcaggggtcagtagaggctcagatgcagcctgtgggttgtctgaggtcttacccaggagatgctgggtgacacttgggacgtctgcagttgtcataacttagggatgttgctggcatggggtgggtgcaggccagggatgctgctcagggccttgcagtgcccaggatggccccacgcggtgaacacttggctgcgcaggggtcagagggcctgagtgctctgcgagcttggggcgtgtggcatgggccccgccaggctctgctgagctcctgcctcatgagtgcctgacacctgccgaggcctgggactcgttctcaagggctgctcccacctcttccctctcagtctcagctgctctcttctcacctgtgttccgcctctcttcccagagtccttcaagatccagtacctgcagttcctggcatacacaaagaccccccagtacaaggccagcctgcaggagctgctgggccaggagaaggtgggtcctggcccccttggcattccgccttcccgcacagaggcagttcgttcctgttcctgggcatctgtcccctgtggcagaggccctggagcgcaggcctgagtgggctccctcctctgctcacctgctgcgagaaacaaacctacccgtttaaacccaaagaatggactgagagacccggaaaacagcgaaaatgagacttttaatcatggttttgcaagacctggtgtctgataggcacacccagcacagtttgaacaagcaaccttccccctagtgcacaggtccctcccccggttcctcaaaggctgagtactgtgaggtcacagtcttcccagttgtcgcctattggttcggcaggggctggagtgcagtggtgtgatctcggctcactgcaaactccgcctcccgggttcacgccattctcctgcctcagcctcccaagtagctgggactacaggcacccaccaccacatccggctaattttttgtatttttagtagagacggggtctcactgtgttggccaggatggtcttgatctcctaatctcgtgatcctcccgcctcggactcccaaagtgctgggattacaggcatgagccaccacgcccggttgtaggtgttttctttagggttgtcctgctgcattttgtgcattgcaatcccagtcagctcagggactgttcaagtatttgacttatgatctaagtagctgggcaggctgattaagaacagacaaagccagctcttttgcaggctggtaaaccttcatcttaggctaaacttctttggttcgggtgagggcaactaagccgggggaagcgggggcaggggaggctgacaagcaggcatcagcgatccaagcaggggcctagtacatgctgtctcttctgtagtttgctgacctaagccaattcaaggcagtttgtcctggaaatggaccactgtatacatgatttccttcacctgaggtcccggctgtggggccccgccctgggagtctccgaggacctgctttagtggggagctagggccgggctatggggtggaagttctggcggcccagagataactccaaaagccattggagccacaaggtcggctgtccctgagccctggtttgcattttggactttggctttgcttttaaaaaaaagcttacagcgtgctttgagcatatatgcacatgcattgctcactgtgtagctgacagcatgcctgggccggggccctgttctctgctggtgtctgaaggttgtcctgtgtcagtggctcctggggtcttcccttggaggtgggcctccggacactgagtgtttgctgttacgctgcagaaggcttccttgcagatccatgtgaaaagtccatcccctggtattgccttgggataaactccttggcattggccggcctctgcgtggctgggggcgctgccctggctgagtccaggtggggtggcaggtgcagtccctccagctggcgagagttctttgcagtgaacctgatgcagagctggtcccctcccgccgtggcctgagtatttcttgacatctcagcccggtgtgggtcccctcaggcatgtctgtccttgagcgtgtcttcaggaagcatgagaggcagggcgtgggccctccctgtgggccctcagtcacctgccctggcccttagtcacctgccctgtttgtcctacaggagaagaacgcccagctcctgggtgcggctcagcagctcctcagccactgccaggcccagaaggaggagatcaggaggctgtttcagcaaaaattggatgaggtagtggaccccagagggcaggtggcaggtggcagctggggcgcaggctggggtggtccatgtccgtcggtatggcttcctgtggcttcctgtctatgcctctgtccagctgtgtcccaggggctgggctgcaggggtggtcatgcctgggggcttacttcaccttggaggccaccagcatgacctctcccccgccccatgtccccagctgggtgtgaaggcgctgacctacaacgacctgattcaagcgcagaaggagatctccgcccataaccagcagctgcgggagcagtcggagcagctggagcaggacaaccgcgcgctccgcggccagagcttgcagctggtgggtgccgcggcgcaaggacagggacgtggaaccagaggggccctgcctgggcgggtgtgtcctctgtgcgggtgggaggctctggaaggcccgcctctgttgtggggtttgttcccagacgaattgcgccacctgtgaaagcttgtcgagcgcgtcacagcaggcaggcctgggcccctcggctggatggtttctcagcggccctgggtgtcatggagccacactctggcaggctcgaggtgtggggtcatgcgagcatcccaccatcgtggtgtgggtgctggagctgcctcatctgtccgtggggggccccagtctccgcgtgttccgcatcctcagcctgctattccagaaacggggtctgtgccctaagcacacatgctgttggctgaggcaggcccagggaaccctgccctgagagtgtggggtgtgctgggcaggcagccagccagtcgcaactgtcccatccctatcccctcagctcaaggctcgctgcgaggagctgcagctggactgggccacgctgtcgctggagaagctgttgaaggagaagcaggccctgaagagccagatctcggagaagcagaggcactgcctggagctgcaggtgggctgcgcgcgaggctgcactccgtggtgtccgagcctctcccatcagcctccctgtgacgtcgttgagcctagggtggttgcggttgcagcagcctaggaagaaggtggaggaggacagttgggtggaggcttatggaaccttctgtcttgggccgcaggctgcccgtgtggatgactctgcctcactctagccctcagctctcgggggcatctcgggattgcttggctgaatgcgcagcgctaacctaggatttcctgatttcctggctgcctccttgcaaatcatttctgtaacagtcataggggagaatttgctcattagaaaaacagctggatcggtgcaggggcttatgcctgtaatcccagcaccttgggaggctgaggcgggcagatcacctgaggctaggagttggagaacagcctggccaacacagtgggactctgtctctagcaaaaatacaaaaattagccgggtgtggtggtgtgtgcctatagtcccagctcccagggaggctgaggcaggagttctggctcccaggatggcatccccaagggccatattgaggcaaaaagggccgtgtttgagcccgggaggtggaggctgcagcaagctgagattgcaccactgcactccagcctgggtgacagagccaggccccatctgaaaaataaaatagcttgtactttctgacaccgagaaacgcattcgtggaggccgagtagaggaagtgtggaggagggtgtgcagcgggaaggtgctctcctccctgctcccaggcagaggcaggtgctggtgggcggtgcccacagctgccgtgcagcctagaaagcagcaggtcacgggctttgttcccagagccccatcccgtcgacactgtgcccgcctgctcaccttacgtgtccccagcgtggtttcactgttgatggacctggtgccctgtcgctggacctctgctgccttttcaaatgactgcaccaaaccgttgctgcaaggctgtccccggaggcgggctctcacgggcggctgacggacgtcgggaagcaccactcacgtgctcccgagctgctccctcacgtgtgtggcccaggcgagcctcaccagcgtacattagagaaacggaggtcgccgacctctttaccacagccgggccctgtgggtctgcctggagtagagccctcgggaagagcatatttgggttctgaccatttttgtcatcatcttttctgtgtaataaaaaaacaatgtgtttgttaaaagaaaggaaagcaggtaaacagaacagataaactaaaaggaaaaagcccctctcagactcagcgcccggggaagctgccacgctcgagtggcgtgtccctccacaggttttacacttagtgaaactggatgttttacacttagagtctattttgagagacgagagctctttgtatcttcctgttgctctttttgaagaaggtgcttccatgtcagcaaaaaccatcctcggccctccacatgactttatttgacgcccccagcttcccgaccccgcctctatgtggtcggcagctttggtttttccatcccacacaagcagcgggggtcctggccacccctccgggtgtccatctgtggcagtcttggttccctggagtggtcccccggtggggcgggcctgacaccatctctcctcctgcagatcagcattgtggagctagagaagagccagcggcagcaggagctcctgcagctcaagtcctgtgtgccgcctgacgacgccctgtccctgcacctgcgtgggaagggcgccctgggccgcgagctggagcctgacgccagccggctgcacctggagctggactgcaccaagttctcgctgcctcacttgagcagcatgagcccggagctctccatgaacggccaggctgctggctatgagctctgcggtgtgctgagccggccttcgtcgaagcagaacacgccccagtacctggcctcacccctggaccaggaggtggtgccctgtacccctagccacgtcggccggccgcgcctggagaagctgtctggcctagccgcacccgactacactaggctgtccccggccaagattgtgctgaggcggcacctgagccaggaccacacggtgcccggcaggccggctgccagtgagctgcattcgaggtgagtgccctggtggggctgggggtctgcagctggtacctgccgactctgcctggtgtgctcaggctgtcgggttctcagcaggagtgtgtttgttgaggagactgaggtggggaggtgctgggccaggccgctgcctctgagtgccagcccacggccctcgagagtgactgcagcttctcattccagagctgagcacaccaaggagaacggccttccctaccagagccccagcgtgcctggcagcatgaagctgagccctcaggacccgcggcccctgtcccctggggccttgcagcttgctggagagaagagcagtgagaaggtgcgggccgcgacccctgccccgggctcagggaggtgctcagcagaggcggcctgagcgagttgctagcaggagggcttgtcctagttgaccttggggcacggtgaggtactggggctgacctggagtaggatgttgtggcagagttgggggcaaccagtaaggacaggtcacaggtgacgttgggcaggtgccatggaggacatggggtttgtcagggtgtccctgatgcctcttagttctcagtgacggacggcaagtgctggtagagacacagagcccagtttgggaggccgctgcccatgaggacttccccgggggcactggcctgtgtgcacagggatggagagggaaggacggtgacgttgcatggacttggcagtgatggatgtgggccctgggaggcttggtggccccacgggtgactgcccaccgagccgggcgggcaggctggaggggacagatgggcattgctttcagacaccaggagcgtgccgtccctctggagtgtcccaaagccggtgtccaggagggcctgactgcgtggggaaggttgcagggccttggcagcgtgggggccgccttgagagagctgtagcaggcccccgtcctgtggctgtggtccctgtgtcctggaggggtttgttgacccacgactgggggtcgggccttcgtctgcagggcctgagagagcgcgcctacggcagcagcggggagctcatcaccagcctgcccatcagcatcccgctcagcaccgtgcagcccaacaagctcccggtcagcattcccctggccagcgtggtgctgcccagccgcgccgagagggcggtgagtggctcccaggtggctgtccccaagggccacgttgaggcaaaacagtctggggtgctcgagacctggctcactttgcgaagtctcacgctgtaaaatgtcgagcgtgaggcaatgcagtcaaggtgggctgtccaaagccggggcgtgtccggtgacctgggccgttgttttcgccagtctttttcttttgggtgaaaggtacgtgtgcaagtggagagggcctcacaccttctgggttgaggaggagctcagaggcccaccctggctcccagcctcactcctcacgaggccacattggctgccgtggcccctgtcctcacagctgcctctgggttctcccacccagcgctgtgcatgcagagaatctcgtcttgtgtagcatgggcgggattttctgggcattgaactattttttaaaaattgtgcgcttcaagtatatgcttcagtggtttttagcatttattttttattttttatttttatttttcagacggagtctcactctgtcgcccaggctggagtgcagtggtgcgatctcggctcactgcaagctccacctcccgggttcacgccattctcctgcctcagcctcccgagtagctgggactacaggcgcccgccaccacgcctggctaattttttgtatttttagtagagatggggtttcaccgtgttagccaggatggtcttgatctcctgacctagtgatccgcccgcctgggcctcccaaagtgctgggattacaggcgtgagccacgacgtctggcctctttctttttttttatttttcgagatggagactcattctgtcccccaggctggagtgcaattgtgtgatctcggctcactgcaatctctgcctcccaggttcatgccattctcctgcctcagcctcccgagtagctgggattacaggtgcccaccaccacgcccggttaatccccgcccccaccagctgagacggagtcttgctctgttgcccaggctggagggcagtggcacgatcttgtgatctttactcactgcagcctccgcctgctgggttcaagcagttctcctgcctcagcctcccgagtagctgggattacaggcatgcaccactatgcccagctgatttttgtatttttagtagagacagggtttcaccatcttggccgagctggtctcaaactcctgacctcaggtgatctgcccacctcagcctccgaaattgatgggatgacaggcatgagccaccgcacccggccaatttttgtatttttaatagaggtggaggttttgccctgttggccagggtggtctcgaactcctggcctcagtcgacccacccgcctcggcctcccacagtgctgggattccaagtgtcagcccccgtgcccggccggttttttgtacttttatacacctctgtctaattcaggacattttcttcacccgggaaaaagcgttgcccgcctcagcagtcactccctagtcgtcccccagcccccgggcccccgaacacgctcatgtctgggcctgtcccttctcttggcacgtgagggcattccctgtgtggatggagtgtgccatcttcatccgtgcccagttgatggaccccggcttgattccctgttttggcgattgtgaatcgttctgctgtgagcgctggggtccaggtttctgtgtggatgtaggtttgctctttggcccatgtgggagtggagctactgggttctgcggtcactctactgacctttgttggacttggagtgtggtgtggggaagtgcagtgggtggtggccggcaggtgtgttctcgcaagcgccctcctcaccccacccgactgctggcatttgtgctgcttggagaacacagccgcttcccggtgagggcgggctgtgggttgcttgggttgtgcccagtaccccctccccacagctggaccccgggacccccgcctcctgacctccctgcctcaggcccgctgcccattcacacgcaggcaccgcgcactctcgctgcgccactcgcctggggccccgctcaagttcccccgctgccctcttcccacgcggtactggacggtgaccccggcggcctcccccagccagctgcaggcctcaacactcactgtttccagctgggttctgggtctcctggggcacctgctgcccctgacacacagggttttctctctgcagaggagcacccccagtcccgtgctgcagccccgtgacccctcgtccacacttgaaaagcagattggtgctaatgcccacggtgctgggagcagaagccttgccctggcccccgcaggtaacgcccctcctgtgccctaccctcaggactctgctgctgctgctgctcttcaggcaggagggctgggttgctgggagtggaacagggcttcctggggtgatcatgggggctgctgccccaaaccgccacgcctcattactgacaccctttcctgcatcccacgagctgggatgcggatcgggctcagctgcagccatctcggcctcatacctgggtctcccgacactgacacctcctgcttgggtgtattaattcagcccgtgaggtcggccccagtgctctcgggggctcctgtactcacagctgggaggcccctgactcaggatcggctccacacacagcagtgcccaatggcacacgaccgtgggcctccgtgctggtagcggcatggtttctggttccttgagaaggtgccgcctgagcagtctctgctgttagcccagtttctgcagagagccagagaggatgccactttggcttttgttgacactgcaggcctgtctgttgtggaagccgcagagacagcatgtcagcgggcatggctgtgtgccagcaaaactgtacttaaaacagcagaggacatgagacccccaggctggtttgctggccccaggttgagatgcggtatgatgcggcagctacttttttaggagtaaaaagtaaaatgtggccgggcgtggtggctcatgcctgtaatcccagcaccttgggatgccgaggtgggcggatcacctgaggacaggagtttgagaccagcctggccaacatggtgaaaccaccgtctgtactaaaaatacaaaaattagccggatgtggtggcagacgcctgtaatcccagccactcgagaggctgaggcaggagaatcgtttgatcctgggaggtggaggttgcagtgagctgagatcgcaccactgcactcccgcctgggcaaaaagagtaaaactccatctcaaaaacaaaacaacaacaaaacaagtaaaatgtacatggccgctattgagacaggaggggctctagggaggctgggcaggcttcacggttggccacgtgagggccctggagaggccaccgaagcccgggcagttctgccctcgcagggctgggttgtgcccttggggtgaggtctgctctgcgagaggcagtgacagtttcaggagattttcaactgggtggcaaacagccaactccagaagcgccttgctgcgcccctgcactgaggcctcattggcagaagcagggaggccgccctttgtccccgggtggtcatggaagtgcaccactcatcgtgggctgggaagcatggctgcggccttcaaggcggccatagcttggagtatccaagctgagttgtcttctgagaacaggagggagggaggccacgcagccatgggctttcctcatggtgtctctgagatcacggggccagagggcaacttactcagaggaagcctagctcagcggggagcccgcaccaggaggcttcttgggaggcagcgtctcagccgggacctgcagggcacaggcagcccagatgggcgggaggaggcacagggtcagccctgagccttgagcttgcccacagagccttctggttccaccccagaggggccgttttcagactcccaaccccttccccacttccccgcctctcctggagcccacagagctcctagggggtggtgctcccacagcaaggctttctctttggccatcctgtgtcccctgagacccccatgtccttcccggcaggcttctcctacgctggctcggtggccatcagcggggccttggcgggcagcccggcctctctcacacctggagccgagccggccaccttggatgagtcctccagctctgggagcctttttgccaccgtggggtcccgcagctccacgccacagcaccccctgctgctggcacagccccggaactcgcttcctgcctctcccgcccaccagctctcctccagtccccggcttggtggggccgcccagggcccgttgcccgaggccagcaagggagacctgccctccgattccggcttctcagatcctgagagtgaagccaagaggaggattgtgttcaccatcaccactggtgcgggcagtgccaagcagtcgccctccagcaagcacagccccctgaccgccagcgcccgtggggactgtgtgccgagccacgggcaggacagtcgcaggcgcggccggcggaagcgagcatctgcggggacgcccagcttgagcgcaggcgtgtcccccaagcgccgagccctgccgtccgtcgctggccttttcacacagccttcggggtctcccctcaacctcaactccatggtaaggatggggaccggcagggctggggagcgcggcctgtgaaagaaagaccagagggagaccgggcgcggtggctcacgcctgtaatcccagcattttgggaggccgaggcgggtggatcacaagatcaggacatcaagaccatcctggctaacacggtgaaaccccgtctctaccaaaaatacaaaagattagccgggcgtggtggcgggtgcctgggaggctgaggcaggagaatgatgtgaacccgggaggcggggcttgcagtgaactgagatcggccactgcctgggccacagagcgagactccctctcggggggacaaaaaaaaacacaaaaaaaaacaggtggaggcagggggccatgactgagcccggccatcctccaccacgtgcggcctggcagcctgggaagaggcggccgacagctgtctctggggttcggagtgcgatgcgctgcctgcaagcttcttcattctcggctgtggggccttagtggtggtgggcacatcaggagggggcatggggggctctgggattgcggggtggtgtgtgaggaccaggaagaaccaggacaggggctgtactggccgctgggcagggcatcagtttcctcaggagaccctggggtgcagacaggagcctcctggggcgggggggctctcctgccttggggtcccgggtctgtggtatgtgcatccattgtgtctgtctgccctcaggtcagtaacatcaaccagcccctggagattacagccatctcgtccccggagacctccctgaagagctcccctgtgccctaccaggaccacgaccagccccccgtgctcaagaaggagcggcctctgagccagaccaatggggcacactactccccactcacctcagacgaggagccaggctctgaggacgagcccagcagtgctcggcgagtccaggggcccggaggggggcggggcctggcagcaggggcaggaggtgcctgctcactgtgtgtgtgtgggtgggtgggtggggaggaccggcaggctcttagggggtgccctggatgggaggaaggcgtctgttttgtgaggggcctccccacaggtcctgggccccgttccgggcagggccggcctcccgggccattcggggtgggacacgagcagggccatcggttagaagaggcaagctgaggaggagctgagcgcagcaggagagaagcttcagcagtgaggcgttggaggtctcatccacacgtcttgccgagtgtattacagtagctttattagataaaattcacatatcgtattctccatttaaagtgtgcaattcagaggtctttggtatatccacattaccactgcctaaatccagaaccttccatcatgtcctgagaaaatctcatcatccccttgaaacactcactccccttctcctcccaagagcccctggcaccccccgcccccatcctactttctgtctctgaatctgagggctctagggacctcctaggagcggagtcacacaggatgtggccttttgtgtctggcatctctcactgagcgtgacgtcctcaaggtgcatcctcggtccctgtcgtggctgggtggtgctccaccatccatccgccctccgtgctaggcttgcttaccctgggcggttgtgagcagcactgctgtggccatgggtgtgcgtgtttgtgtttgggagcaagtttcccgtttcctggtgcctgggcggaggtgctgggtggcccggccccctgggctctccagcagccacaccattccaccctgccaccatgggtgcacgagggtctgaggtcctcagtccccacatcctcaacacactgaatttcttgttttgattctagccatccgagtcgtcgtgaagtgatataacatggtagggttttttgcttttttttttttttttttcctgagacacagagttttggtctgtggcccaggctggagtgcggtggcgcgatctcggctcactgaccctccgcctcctgggttcaagtgattctcctgcctcagcctcctgagtagttgtgtctacaggcacacgctaccaccgtgcctcgttcgtttttttgttttatagagatcgggttttgccatgttgcccaggctggtctcaaactcctggcctcaagccttctgcctcccagtgcctcccagcgtgcgccatcacagccggccctaagtgtgcttttggtggtgttctgtgttagttcgttctgctccttgcccacgtgtgcgtgcacgtgttacacgagaaacattgtagcacctggatgctctgttttgcattgggattgctcagcttagtggtttccaggatctttaggaatttgtgtgtccctggtgtgttcttgggacattggatcaaagcgaccccatgcagtgtgtggttgggcatgtcttcacgtgctggcctgcaatgctgtggcattgtttgccacctgaggcaccgaggtctgagaggggccgggagagggaggtaggaagagagctctgtctgggattctcacacttctgtgtgctgggaaattgcttctcccattcagctgctgtgcctgatctcttggctgcttgtcccagcagaggccctggagtccctgccaggacagtacccttgtggcacaacaggggtggatcccagggcccagccacccagtccaggcctggcccagggtggctgcacgggtcccctgtctgggccgagtgcttctcgttcaccacctccggagctccctgggctgttggctgtcagcatttgtgtcattcttagtatgcagctgggtttcaagcattaatgacctttttttcttaacagaattgagagaaaaattgcaacaatctccttagaaagcaaatctcccccgaaaaccttggaaaatggtgagtaacaagtgttttgcggcgtggccaggcctgtccgtgtggccgtggtgcccagtcagtgctgctgacccacctgctggcccgctgcatcgtgtcccgcatggtgctggcccgctgcgtcgtgtcctgcgtggtgctggcctgctgcgtcgtgtcctgcgtgggcgccgacactgggggcgctgggcttccagaactgcctctgggaggccctcactgcagcccagggcctccgcgcacacgccatgctctcacagtgggtggctgacctgcggggatcgtcaccttgggtcccctgtttgctttgcaccctggccttccccccgagtggtgcctgcgtcctcagtgaggaccctgacctgctctggggcagccccaccttccctcccgcaggctgctgacctcagcattttccccagagctcatcccgcatggcctctgagacccgcttcagctgcctctgtcctgtcttccgccctcctgtcccatccagtcccgtcccctgccatctcatcctgtgctgtagtcctcctgtcccatcccatcttgtcccctcccgtccccttccctcctgtcctctcccatcctgtcccgcttggcatcttgagtgtctgtgaccagccctgcctgcagagttgcccgggccgtggcagcagccccggttagcctcatgggtagcccgggcaggtgctctgggctcacggcttctgcctttcctctttgccaggtggtggcttggcgggaaggaagcccgcgcccgccggcgagccagtcaatagcagcaagtggaagtccaccttctcgcccatctccgacatcggcctggccaagtcggcggacagcccgctgcaggccagctccgccctcagccagaactccctgttcacgttccggcccgccctggaggagccctctgccgatgccaagctggccgctcaccccaggaaaggctttcccggctccctgtcgggggctgacggactcagcccgggcaccaaccctgccaacggctgcaccttcggcgggggcctggccgcggacctgagtttacacagcttcagtgatggtgcttctcttccccacaagggccccgaggcggccggcctgagctccccgctgagcttcccctcgcagcgcggcaaggagggctcggacgccaaccctttcctgagcaagaggcagctggacggcctggctgggctgaagggcgagggcagccgcggcaaggaggcaggggagggcggcctaccgctgtgcgggcccacggacaagaccccactgctgagcggcaaggccgccaaggcccgggaccgcgaggtcgacctcaagaatggccacaacctcttcatctctgcggcggccgtgcctcccggaagcctcctcagcggccccggcctggccccggcggcgtcctccgcaggcggcgcggcgtcctccgcccagacgcaccggtccttcctgggccccttcccgccgggaccgcagttcgcgctcggccccatgtccctgcaggccaacctcggctccgtggccggctcctccgtgctgcagtcgctgttcagctctgtgccggccgccgcaggcctggtgcacgtgtcgtccgctgccaccagactgaccaactcgcacgccatgggcagcttttccggggtggcaggcggcacagttggaggtaggcagggcggccgtccgtccgccccccgccccggcccccgccggaggccccttcctttgcaggttcccttccgcactctcttgcagcaggagctgagctgcaggtcccctggtgccggccggcccccgccatccgtgcacggtggcgaactccagtcctgtggggagagggctcacgctgagtccgtgtgtcttgggttctctggttgtaaccgcgtccctcttgttttcagaaggccaccgtgcgcagggccaccagagcattactttctcccgtggaggtcacctgctaggtgtggccgcccgggctctggcaaggctctgggagctggtgttgggtaagagcgagtccccgcagtgcctgcccagacagggcggagaggagccgccggggggagcggcctggccctggggctgctgcggggcggggggccggagggcggagggcgggccaccacgagcctggccgagccgctgcttgtgcttggtgcccgcacacgcctggcggcgccgtttcgcttccctttttgtgagcctgcggctgctgctctgcgcttgcctggatgctgccgcttgttgaagctgcgtttttctctcctatttgcaggtgtctttaaccacgcggtgccctccgcctctgctcatccgtttggagcccgtgtcggccgcggggctgcatgtggcagcgccacactgggcccgagcccgctgcaggcggcggccagcgcctcggcctcttcctttcaggccccggcctcggttgagacccggccgccccctccgcctccgcctccgcctcccccgctgcccccgcctgcgcacctgggccggtcccccgcggggccgcccgtcctccacgccccccctccacctaacgccgccttgcctcctcccccaacgctgctggcctctaaccctgagcccgcgcttctgcagagcctcgcgtccctcccgcctaaccaagctttcttgccccccacctctgctgcctctctgccgcctgctaacgcctctttgtctatcaagctcacctccctcccgcacaagggcgcccgcccctccttcacggtgcaccaccagcccctgccccggctggccctggcccaggccgcgcccgggatcccacaggccagcgccacggggccgtccgcggtgtgggtgtccctcggcatgccgcctccctatgccgcgcacctttcgggggttaagccgcgataaagaccttgcttagctagcagtgcgtattgtgtaaggtaaggccagagccctgcgcggtggctcactccagacactgaactgtccttcctttggcagagaagacggccacagggctcggcagaagttccgggggtcctgaggagggaagagggagagagccagggagaccagggagatggtcgcgagaggagggactacaggacgggcaccagccatggagtggcctgagtgtgttgggttccagctgcccgcagctgggttcctgcggtgacgccgcaggactgaggccagccctgggggcagctgtgccagcccctgtgggcgaggctcacggggtgccaggccagggggctgggagctctagctcctagagcagtctccagggctccatccgcaccaggcccaggtcactcatgacgggtggcgtggcttggtgctgttccccaggcgcccagcatgtagcaggcacggtgccggctgcagaggtcctggagagccagggtggctggctggatgcctctggtcggggctgtctggccagtagcctcggatgccctcatagggagccagtgaagccccaagtgccctgcctgcctgggggctgatgggttcccggcggggtcgagaggcaagctctgtgccctgcgtgttgaggcccccttgctggacacggctgatggccacactgccctgtggtcatggcccacagccgaggggctttcagctgctcagatgtcagcaccaagctgggcaggttagtgtagacggtgcccacctttgagaccagaaggaagttggaagcaggagtgattttgatgatgtgaggccttcagggaatgtcctgttcactcctcccccaagaggctgtggagactgtggccgctgacccctgagggcagttggccacccgtgccctccagggacatggcgtgcctggcggcgtagtgcaaaggtgccctctgcttgcccctggccttctgcctcaggggcccctgggacacaggccttcctgggcgagtccaaagcccaccgggcaaggagaggaggactgggagccaggagccaaggcggaggctgtggccagggctggtcagcctggcgggtcaatgcgggcacctgcgggctggacaagctatgctgggtctcttaggagatgagctgcaggtagggtggctttagctggactcggctgtgtgtctcctttggaggaaggctggagcttggccggcgtgtccaggtgtcaggctccctggtctgtcacggggcacgcccgtcgtctgttgtggttagaggagctggcactatgcctgtcatggtgctggccccaggtggcgtgtgtgctcgtgggaggcctcggtccccagcctgggtgagtgttgggctcccccaggcgcgatggtaacctcaggccgctcttcccgctgtgcccttctgcaggtaactaggatttctacctcaaccgcgagacctatgcaaggacggtgtggaccaactcgcgcccgcggcatggtgcccgccggcctgccgggctcccacccctggacggcagaggcaaggacggacgggagctccactgtgaatcggcggcacgcgccgcaggaggctgggactggtccagtttgtactgtcgatagttttagataaagtatttatcattttttaaaaagtataaacaattctgacttattttattccatctaagtggtaaaaggcaacttattgagaaatataaatatctatatatgagagctctatataaagacacgtgtctgcagggcgggcccgccagcggattcgccacagcctgccccggtgctatctcgtccccaggcccgcgcctgcctccacccgcttggtgctgactagacgctgacaacgccgaaccccgttctcggaaacgccgcccggccggctcccccgacgcgctgctcccgtaccaaaggcaggcccgtcgccaccacattcctcggaggcctccccgcggcctgagccccttcctgagcgccctggcgcctgccctgagctcttcacctttaccccggcactgtgaacccccagactgttcaccctccggggcgtgggttgcgcccttgcatgtgaaggggcctgcgcggtgacgcagctggccatgtgctgcgcgatggtgctgtgaggacggcgcgggcacgttgaacaagtgcatttacttttgtatttctcggctgtccatggctcgcagcatgccctgcgatgcggggcaggcctgtcgtgggtcccttggtgtttctgtacaggagagagtcacactaatgagtggcagtattttatagagatgtgatgagaatttataaatttcatagatttgacagcttttatttttagatggtataatgcacagtgaagaggaaagaaaagcgaggggaaaaaaccttatttattcaaacagtgcacaaaatggccccagcgtcagccccgaccctagacccctcagttgcagctcccagcagcccagacagagctgccggcgcccctgcctgccccacatcccttcctgtcagggccacgcctggcacccatcccttggagcctgtgctggttctcccagctgctgtgggtgtgctggggccagggtgcactgctgaaacctggcctctctggccctaggccccagggtgacgtcggccccccactctgcagccttggcgggtgcctgggactgggtgtggaaggagaggagctgaggccggggtgtagcaggcaggcagggccactccagtgcttctggagccctgagcagtcagggcctgggttgtctgagcagtggtggctctgtgccctccctggaggatgggatctgggagtctgagctccccgcatctggccctgggctgtgtggcacttgctgagcccaccttctcaagtgcttgctcctgtgagatggcatcggggagccccttccccaaggtgccacagatccaccctccagggagctgccagccctgtgttctggttcccaagggcaggatggacacacgtcacatccctaccacgtggcctccaaagggagccacggaggaaaggcttctgtggttgctaggtgggggagtcctgtgtgggagggcctgaagacccctgcttgtgcctggtgaggggggtgctgcctcccccagcccccaacaacctctcagacccccaccctccaacatagctgagttctgaagatggtgctccggacctgtcctcttaagtggtgcccagtgccctccccaccccacgttggtgctctcagctagaaggtgctgtgcctctgcctgagccccaagccccgagcctggccttcaggacaggcagcctgctctgtgtcgccacgggccggatacgccacagggttgatggcagagacggccgagtccctggtctagaacaagacacattctttaaacactgtattacttctgcctccctctaggtgacagtggcagtccgggtgccatcacgggtcctgcagatggccatgcagggctcctgcccacgcaggccaccgtatgttcaggacacgcactgggtctcagagccactggcccaggcagaagtctccttgagcccactgggtcatatgcgtgtcaccacacgtgaactagtgtggtggctgcctgcggacaccctcctgttctgagccctgggcctgtgttcttctcagacactcccagactgaggggtggtgtgtggcgggtggcagggtggctgtggagactggggatctggagcctggtgctggcacctggcctgagtttccgtgggcagctggcggggacctgtgctgctgctgctgactgtgggtgggcgggcggcgcctgggagtggctcttgctcaggaattgataggaaccctaaaaactaggataccccctcctcggcccatgaggcacgcacagtgacttatttaagacttcccccttaatttatctgcccccaggatgcgtcagtctgttcagtggtcagcaggccccccaccccccgccgactgccctcgccatcgtggtcagacccccctcccaacacaacacgctgctggtctgtgtcagcctttgtaacgtgggaggctctgccgtgtcttccgggtgaactgtatttggattgcgcgcattgtcacggtccgcccctgggctgcaggcgccccttcctctgggcacccctgcattctgcatccccacctctagacgctgtaataaacagactgttttcactcggacctggtgtgaatggcagcctttcttccaggtggcatgaggcgtctcctggcggccagtgagaggccccggctagtgtgtcatcgccgaaacggggagtggagggcctaggggtgctcctagcagaagctccgggggctgacaccaggacaccctggccttggggaggcttatgagggcaccaggccacaggcaaggggaggcttatgagggcaccaggccacaggcaaagtgccttttgatgaacggaaaaccagatctgcgaccccaatgacatcggcaaagtccttttcacatcagatggaccaaagcccgcccaggccccagccacactccgggagggcccgtgaatgccagaggcaggaccccaggtcaccacaggattcctgataccacacagcagctctgttctccccaggcctgggtcccagcctccacctgtcctggctgggggttctagctctcccctcagtgcaggaggcccagccactgcctctcaggaccctgagccttacttcccttgggtgggggctccctggctgcccctcccctctccttcacttcaccgccatccagtgtggaaaagaggtacctttatttgaacagaacaagcaccctggccccagggcaaccacttccccaggtgcacagccagggccctcctgtctgcaggagaattcacagctggtgtgggactcagcccctaggccattcacagctttgtctggctctgtacattcattcagcacggggcaggggggccatgccaccagcctgggggctcaccaggcccctggatgcacacaactcaggcagggcacctgtgggaaggcgcatatcctggcggcagcagcacgtggcaccaggtgccaggccagttaggtggatcctggggccccagggagcgcagcttgctgggcagtttcataaaatgcagcccctgcccacacccacctggcttcaggctttggatgtctccaaaccaaaaacctcccactgaaaatccaggtgtgatggccgggtgtggcggctcatgcctgtgatccccgctacttgggaagctgaggcaggaggatcacttgagtccagaaggtcaaggtcacagtgagctgtggcaccactgcactctagcctgggcaacacagtgaaaccctgacccaaaaaccaaaaaccaaaacaaaacagatccaggcatggccaagcgattcatggctgggcagggccagtcccgtcccgctgcacgctgaccaccgtgccctgcgctcacgcctgcaagccactcagctggaacctggcctcctcggatatgccgaactgttccagggggtcctgtggggaggacgggtggccatgagccagggctggaggactgcctctgccacctgcagccccaccccggccctctgcagccctgcacacaccttgcccgtcaccttccggatttcgttcctgtagaagatgaggcttctccgcatgaactcgtagctggggaaaagggtggcacggggtcaaatgcccgctctgcatggctgctgtgcccaccccagcagtgcccaccaccgcctggccccacctggcccgacgcagagcctccatccactcctgacactgctcctcgctgctgcactcaaagtgatacttcctctcagggtcctcaatgaagcctggggatggaacacctgtggtcggtcctacccacagccacaagcagcttcctcttgccattgcccataaactgtcccttctctggcccccacaaagatgtgttcatgtcctgaccccccagaacccatgagtatggccctgtatataaacagggtctttgcatataaactagtcaaaatgaggttgtcgccaggtgcggtggctcatgcctataatcccagcgctttgagaggccaaggtgggaggattgcttgagctcaggagttcgagaccagcctgggtgacatggcaaaatccccatctctacaaaaacaaaaattagccaggtgtggtggtggggccttgtaggcccagccactccggagtcagaagtgggaggactgcttgagccaagggggttgaggctgcagtgagctgtgatcacgccactgcactccagcctcggaaacaaaagatcctgtctcaaaaataaagagggccgggtacggtggctcaagaccgtaatcccagcactttgggaggccgaggtgggaggatcacctgaggtcaggagttcgagagcagcctggccaatatggcgaaaccccgtctctactaaaaatacaaaaattagctgggcatggtggcgcgtgcctgtagtaccagctactcgggaggctgaggcaggagaatcacttgaacccgagagggggaagttacagggagccgagattgcaccactgcactccagcctgggcgacataccaagaccctgtctcaaaaaataagcaaataaaataataaagtgaagtaaaaaggggttgtcagggtgggccctaaattctgcttggcgtctgtgtagaaggggaaatgtgggcacagacgtgatgcaaggaggacaaggtgacgcttccacaagccaaggaacctggaggatactggccaccactaggaactgggagattcccctcggcctcagaaggattcggccccacccacaccttcatctaggatttctggcctccagaactgtagagaatgtttctgatatttaagccacctggcctgtggaattttgacagccactctgggcaaactagcagggactccatctttccccgcagaagggaatctcttaagacccaggagaacacccccctctcactcctcctacccccacctgggatttccagcccggggccatataacaatgctagacccatgctactcttggcagctggggaaacgctttgggtggggctggcccacctgccctgtaagtacagcctgggcccacagggaacaaagagcagagtctgggagggacccaagcttaagtggactcggcaggtgggaagggtggtgcccgccaggagaacttgaccttgagctgcccgtggacaatgcactcttgtgtttgaggagggtggcgccaggctggggacacagaggagaccttgggcgcccggggaggggaaagtgcggcgctgcgggtgccccgggctgcgggaagcgccgctggcttccctagccccactcactgatggagaaggtgccgggctcttcccggacgactctgcagcgctccagcagcagggctccgacgggctggaggagacacgggcgccgggacggggcagtgagcacccggcctccgaggggcccagcctgggacccgcccgcgcgcccgggacgcccctacctcggcctcgtctgtccgaaagtagaagaggaaattcaccaccagcttcaccagccgccgcttcagcactgcgggcacagcgcgcactcaggggcgcaggcagcccccgcccggaccccggcctcccgtccccggcgccccgacccggactccggcctccggcacccccgcccagaccccggccccggcctcccgcccctggcactgtctcggtctcccgggtcccgctcaccgctgcccttcttggggcccctcatgcccagctcggccgccatctcggccggctgccgggacagagcctgcagctccttctcgttgtaccgcatggctccgcggggaacgggaacccgggccgcgccctcccggccgccgtccccgctcaggctggggccggcgccaaaaatgtctcagggcgcagacacggaagcacccccagggctagtgcgcctgcgcaccttgggccagccatgccgcccgcctccgctgcgtggcgctggcgacccgtggctgctggcgtgggcggggtaccggttggtaggagagacggaccgttgttacataaccattaaactgaaataaaccggaccaaggtggaacagaatcaaggcaccccagcgatggctggcacccctttctagagcggccaggcgcaggcggagggagcgataacgtcgcccggagagtgtcagccgctccctcgcgaaagttggccccgtgcggccgcagcggaccgagggttcgttgagagcgttgtgcgcacgcgcagtttgccttccaggccgcgctttcagcctctccccctccagccttttccttcgcgcctcgggaccctctgactcacgccgctgggcgggccaggcatgcgcacaccagagggcccgtctcatttgccccggaagtgctttctttgcccgccgttcgccaaacgaagtcgtggaggtggcgaaacgaggaggagataacgcggccttgggctctggtgaggagtagaggcggttgagggcggcggccgacgcggaccgggggttccctgggggacagcggacgtaggagagaggcgcttgcgacaggccgcgggccgagggtggggcggcggcgtcgctcccctccctcctcccgtgagcgtccggccttgtgcatcctgaggccccgcgctgggcgggcctggagggtcgggcccgccaggaactctatttccaaactcctgttgggaggccgcgcgcggggcctcacgcctgtaatctcactgctcagggaggccttggcgggaggatcgcttgaggccaggagttcgagaccagcctggacaacacaccgagacccccatctctacaaaaaattttaaaaaattagccaggagtggtggttgtacctgtaggcccagctactcgagaggatcgcttgagctcggaatgtcgaggctgcagtgagccatgatcccaccactgcactccagcctgggcaacatagcgagaccccatcactgcaaaaaaaaaaaaaaaaaaaattagccgggcgtggttggtgacgcgcgcctgtagtcccagctactctggaggctgaagcgggaagatcgcttgagtccaggaggtcgaggctgcagtgagttgtgattgtgccgttgcactccagcctggacaacagagcaagaccctgtttgacaaaataaaaaagaaacaaccaagattcgttggggtcgaatcgggatcgcggctgaaatggtttcggccgccttccttgtagccgagaacgcttctgtatgctcatctatacctgttagttgactggggctctgtgatgtaattcctgtgagcctcagttcccttaaaatgggagtgacggcttcaacatcatgccaaaggcgaccagaacacgttagctggccccattttgcaggtgcaccccgctgtgaccgttgttcttgtgtatccttggacgacaccaaacagccaggcggagctctggaaaataggttgttggctaggttaaggagagaacggtgttgccacgaaaaactaattccttctcaatggtctagtcccaggtcccagaggccacttttcctcaattcttaagctcatttcccctggtcgtcatcggttttttgtttgttttgagacagggtcttgctctgtcacccaggctggagtgagtgcagtggtgcaatcacagcttactccagcctcaaactcccatgctcaagccatcctcctgcctcaacctctcgagtagctgggatcacaggtgctcaccaccatgtccggcgaatttttgtattttttgtagagacgaggtttcgccatgttgcccaggctggtctcgaactcctgaccaggtgatccacctgccacggcctcccaaagtggtaggattacaggcatgagccactgcacccggctaatttttgtattttttgtagagatggggttttaccaggttggccaggctgtcccctgatctttaccttagtaagtaacagatttcttcatggatttatcaatttgtagacatcatctgctgatttcttgtcacggctgttgagatcttctccctcccatccacccactgcaccttcaccttccatatcctgaatgagtttatgtcatgagcatagttggtcattggttgtgttttctaaataagatgcaaaatattgttggctgctaaaacaagtaatatgttcagctaggcttttcttgtaccattctatcttcccttaaagctaattaactttgtttttaccatgagcctgattttcttttacctgctgtttgttttttccccacaaagctcccacctctcacacacctatcagttgtattttgcataggtttaaataaattgatctcccctcaccacttccctccaagacccccttatcctcctcctccaaatgggactggttgtgctctgacctggaagtggagctgttgtcccaaaccttcctgtccttgctcccctgtgctgacctctgtttccagtgtggtcatctctttcccttcatgctgtccgagcaaaacttctgggagcttttgaagaaacagatgatttttttcggggggtgggggaagtccttgattgtctgaaaacgagtttatttaccctcatagttagaagtttggtggggtataaaaatctagattgaaaatctgtatttgtaggccgggcgtggtggctcacgcctgtaatcccagcactttgggaggctgaggcgggcggatgacctgagtttgggagtttgagaccagcctcgccaacctggcgaaatcccatctccactaaaaatataaaaatttgccaggcgttttggcatgtgcctgtaatctcagctactcgggaggctaaggcaggagaatggcttgaacctgggaggtggaggttgcagtgagccaagatcgagctactgcctgggcgacagagcgagaatccgtctcaaaaaaaaaaaaaaaaaaagagagagaaaaaaatctgtatttgctcagaactgtgaaagcattgttttcagtgctgttctcaaaagatcagttcctatgctggtttctgatgttttctgctcagttgtctttctgtctagtagaagcttaacatcttccttggtgtcgtaaaatttcctgatttcctcatttaccggggatctttttatttgctgatcctggtgggtgcttggtatctggacagtttggttcctttagtcctgggttttgtttttgtttttaattttcttgctaatgttcttatgttatttctgtgataatatttttcctgttttattttgttgggtgttttttcagttctcactctggaatgtcctctaggttcttgcttttcctcctgtttttttaacttttgactttcctttatgaaagatttgtttggctcagcttccaactctggtatggaattttttgtttggatcgtcctgtctgtatttttcaagggctttttgttttaattcagcttgtcattcagcttcctgttctgggtttgtggtgcagtggcttcccccgataatgaaggagggtgtcagcgatctcttactgggatacccatcagtctctttgttctcggatgcgtgtgtttctctttaagaacaaagcggccggcagctctgtgtgagcgccacttctcatccagggaggtcaactgcccagtggcctggcaaggagcgggccttttctttgaggtgtggggaccctgaatgtcagtatttgagaactcttcctctggcgctgtttccccggaaaagactcctggcctcccccggggtggggggcgtccgtgctgggccgcctgccacctgagctgtgcggaggaaccgccagacttcccgctgcccaggcggcaggtcgtgattcagtccccccttttcagcctgaccctggacccccttgctctgctgggcctgtctctctaactctagaggcccttttataccagttcttctgggaataaagttctgatctcctcgagggttgtgggcgatccgagcgtgggaccttccccggggtgccgccccatttcagctgctgaggagggacagtgtgggtgttcggtggctgcgatggcttgggttcggatggtttctggttttcggatcagagctttacttggtgagtggttgagtattggtctgggtttaggtttcagtgggccagactccacaggtgctccctgtgacagctggagcttgtgtcctgagccagccactggccgctggggcgttctgtctggccagttttaagaagtaacttggcttgccctagatggatttgaactcttggctttgttagcattttgccatctaagttccttctccaagtcctcccagccatcgtgtcattagaacgttctggaaatgtcactaaaatgtgcccggaaataagtgcatcaagatagattggtggctcttggtgtggccatctgcacctgtcctggccccagaagctgtgctgcctcttccgcatggaggagcaaagcgcaggtcgctcctgaggctgagctccgctcctcctgggccctgggtcctccgcagacacgtcccacccactgctcttctctctgccagaagctgccggccatgaggacgcatgggtgggcgctgtggagagtgcaggcttgggggtagagaccagtgatggctctgcagagcttagcctcagagtaggggcgtggtccaggagaggccacgacagggacaagcagggcgttcgcatgctgttgaattccttcatgacgaaaggagcaggtcgtcctcccgggagaggggagcgcttgatgacgccccgagatctgtgtgtgggagtgcctctcagcaccaggcccctcctgggttcttggagtgcatccgtgaaagaaggccgattccctgccttctcacacgttcccccgagcgagggcttggttcggtgctgagatgcgtggaggactgtggtttctgtgatgtgtggagaggcaagtgcggctgcggcctggtgggaggctgcttgctgggctccccacgcacgtcccctgatgtgagtttcatgtcacttgaccaggaaatgcttgaatgtcctccagagaaaaatgaggcacttcatgaacctgtccgggcggcacccacacaatcctgcccgcctgtgggccgtccggagacagaacctcccaggcagctgtaagctgttgtggcagcagggactgtaggagttggcgtggcctgcagctgacggcgccagcatggagagggtgcagttctccctggtcctgaagaatgtgtggccaagaagcccgaggcggggagggttccttggggccagagggtggcgttcccagcaaaggacagtccttctggtgtcacagtctcctttttcacactggaatgttctttgttttgtgaagggatggcgatggtcacagtggtggtttctcgaagtttacgtgacaacatgtaaaaatgggcatctctaggtgggcttttgtgacatctgaacttctgatggggcagccgtgatactgcagtgagctgggaggtccacctcaccagttaccatgcttgatcattttcataaacttgcccagggaataaaaactggttggggagggctcctgggcccccatagagtaaggggtgacttcaggccccaccacaagtcagcagtacagctggcctgtccctcagcatgcccctgcacacctgcggccactgtggcctgtccctcagcgtgcccctgcacacctgccgccactgtggcctgtccctcagcgtgcccctgcacacctgcggccactgtgccctgtccctcagcgtgcccctgcacacctgcagacactgtgacacatcactgcagacgcagtagttcagatgacacggctgtatcagcttctggttctggggtcagagtccaaacagtccacagggctccattccttctggaggctctgggggacaactcgtttcctgcctttcccagtgtccagaggcacctgtgtgccttgcctcggggccccttcctccccattcacagccacagcgcagcctctctgactctcagcctcccgcctcctctcatgaggtcacccaggatcacctgccattttaagatcctcaagcccacctgcacatcccttttctgccatgaggggacatgttcacaggtcccagggattaggatgtggacatcttttgggggcagtgattcactcagtctcatgggccccatctctctgagctcacccaagacccttaaaccagggcccggggccaacattgagcaggcaagggaaagactaccaggagatgagaggaggctgcctggaactcagatttgcacagagcctgaaagggcgtgggagaccttggcagaggcctgcatcaggaagaggatgttggggactcagcagagccccctgcgccacaagcagatgtggcagatctcccaggtgttactcagtgaggatgcgaagatcagtgtcctcactgatctccgcctaacaaatttacatcgagcccaagagattaggttgggacaagtaagcgtagccaaccagagagggaattcagaggaaggcgtgaacactaggggcttgggcagtccgggatggcttcctggaggtggtgactcgtttgtgagatcttggtcttgtcttccctttatgccttctctgggctccctattacaatttcaggtctccaggccttggcaccctgggctggagcggcttcctctccatccctcatgcctggtcacttggagacaggctccagcttccttgtgtctgtgcctgtccacagtgggcctcagcctcctggaagagactgggtgcgctatggggtggccccctcagggctggttagaccctggcgctgggagtgcagggtgaggggcagtctcgagggctccagcccagcccgcccagggaggtcccagcagcagccccgagttctgagccatcttcctcactctcctcttggcctccacaggtgtctcccagtctgctaaagccctaaggccatcaccatggacttccagcatcgccccgggggcaagaccgggagcgggggcgtggcctcctcctccgagagcaaccgtgaccgcagggagcgcctccggcagctggccctggagaccatcgacatcaacaaggtgggccagccaccgtgcagctgcctgtggtgggtgctgggctttccagggcagccctggagagggtgccagaggctcttcttgggcctccgcccaggctgggcgatgcagccccgtgtccagacgctcccctgttgcccccgagcagccacagctcccatctgtccaccccagagagcagaccctctgtggctctgagtcccatgtggacatgttttgttctgtccacagccttctgttttgcattatttaattttctgggagtggggagagctgatgtcagtccagccagatgtggtgaagggcagcctttgattttagcttgtgcagaggcaggggtgagccgagtcccctcagcaccgtggacatcggggctggagcactctttgtgtaccctgacatgccccacgggcctggcctatggcaagggctctgttaccgtccccgtcttccagatgaggtcatgggtagagggggtgccacagccgcagatggtggagttagactttgaactccagcgtctgagacgagatgtgtgcgcccggctgccccagcttagggcctgcagatgggcgggtctttgggtcttcagtgtagcccatttgcttttcttgtgcctgtgtctgccttgtgcctactgctggcgtggtggcgtgggcagtggacggctccctgcctcgggagtgaccggcggtgctgtcctggctgtgcctccctctgactcagaaccaccaggaaggtggtgtcgggggctccctgggaacccccactgctcgaagcctggcccacagccccaggtggtgacacccgtgctcacgaaggcctcccgctggatcccccgttttcagaaatgcttgaccactgtcagcggtagccatgcctctacagaaggggggttctgcctccatgcctctacagaaaggggatcccgcctctgagggccttgacggcagcaggccgcgatcttctgtctaacgggcccctgttcttcccctccaggacccgtacttcatgaagaaccacctgggctcctatgaatgcaaactctgcctgacacttcacaacaatgaggtgcggcctctgcctggctccgggcggctcgcggcgggctgagtggctgacgtcagggggacctgcctgtgtctgtccgcccggcctcgagtcatgcgtgtttcctttccactccaggggagctacctggcacatacgcaggggaagaagcaccagaccaacctgtgagtacctcatgtccctttgatgcctggtgctccagcagccgttggctcaagtctctgtgagcctcgcgggccactgctccacagccggggagccagcctggcctgagcctccctgggcgcttgagtacggttcctggggagcattagagaacagaggcatggatggctgaggcgggcagatcacttgaggtcaggagttcgagaccagcctggccaacattgtgaaactccatctctactaaaaatacaaaaattaggccaggcatggtggcacacgtctgtaatcacagctactatggaggctgaggcaggagaatcttgaatctgggaggcagagattgcagtgaaccaaggtgctgccactgtactccatcctgggcgacagagtgagactcttgtcttattaaaaaaaaaaaaaaagagcagaggcatggagttgttggaagggccccagccagggacagtgaggagcatgacaggaagagaacatgcctgtcctatccctgtcctcagccaaaccccagggcccctcccaggcccctggccctcctcatctctcagcttgtagtgagctccaaggtcagggggctcctggcacctgggcccatggctttggtgcctgtgtgtggaggggtcccagcagcacctccatcctgtccgcagggcccggcgagcagccaaggaggccaaggaggcccctgcccagcccgcgcctgagaaggtcaaggtggaggtgaagaagtttgtgaagatcggccgcccgggctacaaaggtgagtctgcccgcagcggggccggccacagccgctgccgtgacataagtgtgttctttagtctccagtgcgggaggtgcagccctgatagcctcctccctgagccactgttttccggccttggtggccgtccctcacccacctgcagcctctggcgttgtgtctgggagctgtcaggctgggcccgataagcacccatctcacccagcagcccatttcccagctgagccacagtctgtgccctcctgtccgggtcttgtggaagcttctgggaattcttgccaagcaaaagagtggaagtggaggtgtggtgagccctggcacatccctccggttaaccttgaagcctttgaaggaggacagggagaagcggctgttagaggcagctcctcccggaccctcagcagtgggaatggctagaggtgaccccggttcagaaagctggggaagtgaccagggtggaagatagagacttgtgtccatagggttcaggaaggcgggcacgctacccagcaagtgttctttacagaaggcggggacagcctgtgtgcctggcctccagacagaagcctgcagggcagaggtcccggggcaggtgcaccgggtgggcgagggtggctagagcggcaggctcctggtggggaggccctgacaggtcctgggcttgggctcaggacggtgaggcggcagagggcttgtgagtgtgcgtgtctgaggccgcatggagagtggccgggcggcaggcagcccagcagccattctcggggtccaggctgctgagctctggcgggaagggcatcctctctcgctcaccgtatacatggtgtcagccctgttcaggcggccccgctcgaatcccagagccagggtgccgagggcccctccctacccagtggccccaactcctgctgggtggtatcccagcacccctggtgaagggctctggggattgggacaaaggagcaccatcctcggtccctgcctgagtgactccgcaggtagctcagctctggcgcacctgtgccttcacctataccagaatcccagagcctgggcggagattgtctaatggttgccagagctgcagggcctcccccggggtcccgctctcgttcagtgggtggcattagcctgccccaggttcctcagcttcggagaggacaagcagccgggacctgagagctttctgtgttgcagtgaccaagcagagagactcggagatgggccagcagagcctcctcttccaggtgagatcagggacttgggcgtggggggcggccaaaggcacccaagaggcggctctgccacccggccgtgtccctgcagattgactaccctgagatcgccgagggcatcatgccacgtcaccgcttcatgtctgcgtacgagcagaggatcgagcctccggaccggcgctggcagtacctgctcatggccgccgagccctacgagaccattgccttcaaggtagcgtggctgcggggttccctgggcccccttgagatgtgcaagccagaaggatctgcataggctgggcaggatgcccctcccatcgggcttggggtcccctgggccccccccaagtcggagccagaagggtctgcacaggccgggcagggcacctctcccattgggctctgcaggagggcctgcttgggctccactgggccaatgagaagggaggccggcagggctgagcgccaggcctgtgaggcctttgccaagtgacctcacttcctgggccaggctgctggagggcttcctacagcctgtccccatgcctggacagggcggccatcaggaaacaaataatacaaacggtgactgcccagggagggggccaacagcgtgctagcattgaggccaggtctgtttcactccagaactgaaccctgtgccccacgaaagtcttaccagccttctcctgggctcccagggtagagtccgggctggggaggctagtgcctcgggctccctgcctgatggtcgccctgaggtcacagggaccaggagccctctctgtcccccgccctcccaggtgccgagcagagagatcgacaaggcggagggcaagttctggacacactggaaccgggagaccaagcaggtgagtggctcgccccgagcctggctccttcccacccagccctggcggccctagccctgccctagccccacccgtgcctgctgaacctttctccgtctctctagttcttcctccagttccactttaagatggagaagcccccggctccacccagcctccctgctggcccccctggggtgaagcggcctccacccccgctgatgaacggtctgccccctcggccaccgctgcctgagtctttgccaccgcccccgccaggaggcctgcctctgccacccatgccccccacagggcctgcgccctcagggcccccgggaccaccccagctacccccgccagctccaggggtccaccccccggccccagtggtgcatccccctgcatctggggtccatcccccagctcctggcgtccaccccccagctcctggcgtccatcccccagcccctggggtccacccaccaacctctggggtccaccccccagctcctggagtccaccctccagcccccggggttcacccaccagcccccggagtccacccaccagcccctggggttcacccaccagccccaggggtccatcctcccccatcagcgggggttcacccccaggccccgggggtgcacccagcagcccccgccgttcaccctcaggccccaggggtgcacccaccagccccagggatgcaccctcaggccccgggggtccacccccaacctcccggggtccatccgtcggctcctggggtccaccctcagcctccgggagttcacccctcaaatcctggggtgcaccccccaactcccatgcccccaatgctgaggcccccacttccctccgaaggcccagggaacatacctccccctcccccaaccaactgagaagctgctccctcccccagcaagcccagcgccaggtgctcttgccttttcccactgagagaaggctgctcttttgtactgccccccgctcattaaacagcctcccccagccctgagtgcactgatgtccgcagcgccgccctactgtgtcagtgtgtgtgggagtgccaggcacagcaccatcccccagtttgggccgactggggagggcctggggcccgccaggagacacctgtgggaggcctgagagatggctgtaccttggagatggcctggtggaggacagaccccaccagccagctaggaggggatctggggtcctgttctggggagggaagagcagactccacgatatccttggggtctccagatagcccaccaggggtggggagggtgagcagggacagggcgcccccactgacttgggaccctcctcctccaggcccacacctcagcacccaggacatctgggccccccgcccccagcgctgtctagtttggttgcctggccgtcactcccagcctggttcccactcctgtgtcttctggggatggccctcaaggacggcatgttgacacatcaggcccagctctatcactggggagggagataggctgccagggacagaaagggctctttgagaaggccactctgcctggagtgggggcgccgggcactgtcccccaaggtcgcggcagaggagataggggtctgtcctgcacaaacaccccaccttccactcggctcacttaaggcaggcagcccagcccctggcagcacccacgatgcgggacctgcctctcaccagcctggccctagtgctgtctgccctgggggctctgctggggactgaggccctcagagcagaggagccagctgtgggcaccagtggcctcatcttccgagaagacttggactggcctccaggcagcccacaagagcctctgtgcctggtggcactgggcggggacagcaatggcagcagctcccccctgcgggtggtgggggctctaagcgcctatgagcaggccttcctgggggccgtgcagagggcccgctggggcccccgagacctggccaccttcggggtctgcaacaccggtgacaggcaggctgccttgccctctctacggcggctgggggcctggctgcgggaccctggggggcagcgcctggtggtcctacacctggaggaaggtatgtggggcccagccccaagcttggcaccgccgtcttccttcaggtgggccgggtcctcctagggaagatcaggggctggcagagcccccaccctgggcagggaggctgtggtcttgttcctaggactgggttgcgggtccgtggcctggaaggtgggcaccacactctgtcctgtccccgaagcccagctcttagacttgcccctgcctcggtgccagggagagagctgctgccttctccccacccctgaagacgacgcagggctcggggccagtggaacccttcttcccacagccccagcctgttctcagggccgctggcctaagatactccctgcggggaaggggcttcatcgggcaccccaacccagagaccccagggcggcagccccacccacagcctcagacgcagcccctgcctgcccctgccgtcaccgctccctggctgcaggaaggcagctaagaggggcacccttgtcccccgcttgaggtcccctgcacagtggccagagcggcagggacagatcccaaagattcccggggggtgtggccttcaatggctcaggcgtcccctgctgtcccggctgcagtgacctgggagccaacaccctcgctgaggttccaggagcccccgcctggaggagctggccccccagagctggcgctgctggtgctgtaccctgggcctggccctgaggtcactgtgacgagggctgggctgccgggtgcccaggtaccagggagttgcatggggcagtgcccgggccgtggcggggggcatggatttgttgcagggtctgcagtactgagaacagcgtagaaccagtggcgatgggaggaaggggaccggtagagcggggctgggtaagcctccatccagccgggctgagccctggtctccgcagagcctctgcccctcccgagacacccgctacctggtgttagcggtggaccgccctgcgggggcctggcgcggctccgggctggccttgaccctgcagccccgcggagagggtaggtccgcgtggagagggacggggagccgggtcgactgcccccgggcccccagcccctgagccagccgcgtgcccacccaccgcagactcccggctgagtaccgcccggctgcaggcactgctgttcggcgacgaccaccgctgcttcacacggatgaccccggccctgctcctgctgccgcggtccgagcccgcgccgctgcctgcgcacggccagctggacaccgtgcccttcccgccgcccaggtgcgcgcaggcaccgggacacggggcaggagcgggcgggggcggcgtggcctcgtggccgctctcaactcctccaattgcgggttccaggccatccgcggaactcgaggagtcgccacccagcgcagaccccttcctggagacgctcacgcgcctggtgcgggcgctgcgggtccccccggcccgggcctccgcgccgcgcctggccctggatccggacgcgctggccggcttcccgcagggcctagtcaacctgtcggaccccgcggcgctggagcgcctactcgacggcgaggagccgctgctgctgctgctgaggcccactgcggccaccaccggggatcctgcgcccctgcacgaccccacgtcggcgccgtgggccacggccctggcgcgccgcgtggctgctgaactgcaagcggcggctgccgagctgcgaagcctcccgggtctgcctccggccacagccccgctgctggcgcgcctgctcgcgctctgcccaggtggccccggcggcctcggcgatcccctgcgagcgctgctgctcctgaaggcgctgcagggcctgcgcgtggagtggcgcgggcgggatccgcgcgggccgggtcgggcacagcgcagcgcgggggccaccgccgccgacgggccgtgcgcgctgcgcgagctcagcgtagacctccgcgccgagcgctccgtactcatccccgagacctaccaggccaacaattgccagggcgtgtgcggctggcctcagtccgaccgcaacccgcgctacggcaaccacgtggtgctgctgctgaagatgcaggtccgtggggccgccctggcgcgcccaccctgctgcgtgcccaccgcctacgcgggcaagctgctcatcagcctgtcggaggagcgcatcagcgcgcaccacgtgcccaacatggtggccaccgagtgtggctgccggtgacccctgcgccgcgcggactcctgccccgagggtccggacgcgccccagctcgcgccccttcccatatttattcggaccccaagcatcgccccaataaagaccagcaagcaaccggctggggtgtccgtgcgtgttagggggcccgtgggacctcccttgccgtctctcctcgcgcacggcccgggtccgccctgtagcgctcgctgtctctcccctgcctgaagcgccccaccaccgtctttcaggccccggacttggtgccgggtccaggcgtaaaggagcaggtgactctgcggccgcagcactcgctttatttcgccagagtcgcggggcgtccagaaggggcccctggactccggcgcggggccggctcagtcccgccccttgcctgcgcggagcttctggcgactcccaggccgctgctcctcgtcgggacgcctcggggacacccaggcctgcttcttcctgggctcggcgtccctggagtcccgtgcccacggccggtggcccccttcgcgtgactcccagcgctggggtagggcttcccggggctccctggcggcccgtggcctctcctctttccgcggcctctctttcttaggtctctcctccttccgcggcttctccttccgcggcttcccctctctccgaggcctctccttgggtccccggtctgcgagggtcacacggtcctcccggacggcctctccggtggcctcgccgggctcctcttcgtcgttctctgcagcctcccgactcccgggaatcttgggtctgacctctgcctcggcccggggcgcaggcggcgctgatggaggcgcctgggcctcgaacttaggctgcaagacagagtggggtcctggggtaagcgcccaccttccccccggcccgggctccttctttccttggggatgaaggtcccaatgcccgcggtcagtggaaggaagctcttaccaggggcgacgatggctccctcggggctgagcttggcgggacccagggctcgggcacacgtgcttggagtgctgcctccccagggacggcgtctgcagcgacagggtcgggacccgagtcagctgggccgaggcacggtccacactgtccatccctccctcacccctagagcccccctccctggacagttggagtggggctcccccggtacggctgagactaaggatgcccccgagccgtgggaagggactccgggactccgctgccgcggcgccccttctccgaacctcgctctttcaattggtcattcttccccccgaccacgggctgtaggaggcccctagcaagggaggggtcgcaggagtgcccccggggggcgctcacgagctgagcggtccccagagagggcgcaggggaaaggcggcagaacgctacgaggcaggaggggttgcacaaggttcatccggaagccagaacctactcgcggcgaggggaatgggccccgcaaaaggtccacaccgggtgagaggggcgcgcaaggcccgtcacttaaggggagatgcacaaaccaactttgggggcgtgcaagacccagccctggagaggaggctcccagaccccaccctggcggcacagcgcctttccttggaggaataggcgcacaggtggaccccagcctcgccccacctctggggagcctgcgctcaccgcggcacagctggaaagccgagcccagcagcgccaccagcgaggcgagcaccaggcacttgttgagcgacaggtctccccagggcagctcctcgctcagggccgggggcggcggcggcggctgcaggggcggcgcggtctgcgccttcttgcgcgcggggacgctccgagggcctgcgggggcaagtgcgcgctgcgctgtggtcactggctctgtgccgcccccttccccgggcgcaggggacaagagacaggcctgtgccctgaacccggctctctctgcctgcctgtgcggccccgggcgcaggtgaacccagccccgggtgccccgcagctgcacggggatgcctagagtttctggaaggtaacttcccggagctgagtggcatagctggtattattacgcattagtagaggctccctgcccgttgactcgctgcctgccacacttcgacgccactcaaccaggacaccaccctccaagatccaaggacccagctccggcacctgagcctcacaccagtccgttcccaccccacacctcacccatgcctcctgcaaacccactcgctccggctttcagcctctccttccccgttcctggggtccccctggcggcaggctctttttccatcttcttgggcctggtgtccacactggggccttcagccacctgagagtcctgtggttatcacgagacattccacatgtttccttccagtgccaaacccttcccgtgggctttagacacctgcctcccttggtcggcttgtccccaactccccaggcgtcctgggttaaaggctgagggtcccagctactcacgtggggcacgctgccggagtcggccagcctgggtgtcgctgtgggaacacaggcagagtcaaggttgtggggacccccaggccaatcccaccctctcccctggccctgctgggtgacgtgcgggtgactaaccccatcttatagataagaaagtaggtggaggccagcacagtggttcacacctggaatccagcattttggggagactgaggtgggaggatcacctgagcccaggagtttgagaccagcctgggcaacatagtgagaccccatctctaaaaaaaaaaaaaaaaaaaaattagcgaggcatggtggcctgcacctgtggccccagctacttgggaggctgaggcaggaggatcacttgagcctgggaggtcaaggctgcagtgacttatgatcatgtcactgtactccagcatggaagacagaatgaggctctgtctcaaaaaataataataaaaatatataaaaatataaagaaagcagacaggcttggagacagctttgcccaaagacacccagcatttcagtggcaacgtgggattcgaacctagatctgtgtggcccagcacctgtcttccttgggggctccttacagacccctgaggcagaaatgagggccaggggttgaacatggggagcacactataagccagtccagtgtgggaggctaagaagctctagtctctgaagatgggcctcctggctcaaggggaccatcagggaagggcttcctcccgccagcgccacaagggtacctgaagccctgtcctcctgggtctcggccagcgcagagtggtcctccagggcctggcagctgcccaggccgccatccagctcctcccaggctctggttgtcatggacatggctggagcagcagcaggtcccaggccaggctgggaggggtggggaacaaggtcttgcatttactgagtctctgccacaggcctgggcctgacctggaggttctgcggacaccaactaacaggccccgtcctcccacccctcctcactcggcaaattcatactcatgccaggcatggcccggcgcccactccaggcatctctctgaccccgcatgcctgccctgggacccctccctaccgcccagcctcactggggtccagtatccatcagtacagtagcccaggctgctctggcccagagagggcgggagcccctgcaggacaacacagcaatgagtcccagacgcaccccaaaccgaaactcttggccccagagtcagctcatgttctctgagaccagggactatttttatctggtgcctgaggccagcgggacaggctaacaggtgccccagcccctcccaggcctctgctctcatggggtctccctctgggccaccctgacttgccattctgggcacccacatcctgctgcgtgaccctgtgagtctacaggctcaggccccagcagcagaaccatcctggctctggtcgtgacaggccggggcaggggaggagggtcccggttgtggttgggggtcttctgatcctgacacagagtaccctgccttgtcccactaactctgttcccataggacagatgaggaaaccgaggctagagacagtgccattggctggaggtcgcaaggagcttcaagtcagacccaaagctgtactcttcagggtccccatggcctctggctgctgggattagggtgtccctgtatctaggctgaaaaaccacccagccctggggctccaagacctggaaggggcctattgcgtggcagtgggggaggggcccaagaagcatgggaggctggtgtgtggcccctgggtgtgcatgggggcagctccaggaattggggacccttacagtcctctgcaacaccccttcacaccccgggagcccacacctctgcccgggattcccccagcctcacttccttacccccgagcctcgcttacccgccagccgctttgctgagccttgtggacaggacggaggatggggagggtggccccgtgatggacggcaacaggtggccagagaccgcgggtgggccaatcagcatgcccgctggagtgaggtcacagccggggagtcccccacccttccctgccattgcagcagggcagggcattgctcctactcagcactcgccactgccacccagggagacgtagcgcctgcagctgggactacaggcgcgcaccatcacacccggtaagttttcaattttttttgagacggagtctcgctctgtctcccaggctggagtgcggtggcgcgatctccactcactgcaagctccgcctcccgggttcacgccattcccgtgcctcagcctcccgagtagctgggactacaggcgcccgccaccgcgcccggctaattttttttgtatttttagtagagatggggtttcaccgtgttagccaggatggtctcggtctcctgacctcggaatccgcccaccttggcctcccaaattgctggaattacaggcgtgagccactgcacccggactaatttttgtatttttttttcagtagagacagggtttccctatgttggccaggctgctctcgaactcctgaccgcaagtaatccatgtgatccgctcgccttggccacccaaagtgctgggatcccaggcgggagcccctgcaatgcattcattcctgctgtttaaagccactgtatttggggtcatttgtttctgtggctctggcaggctcatacactcggaactgcctgctcccacaccgtcatgcagagaaacctgacgcctctgctctggagaggacccggggtctctcagcccccaaaggcacattctaaggcctgcaggcagatgtttgagccctacctgcaaagcatggtgactctgggagtcctgagggaagaggggaagtggattttggtggtgaggcctgtgtgttaaaaatcctgagtgaatggccgggcgcggtggctcacgcctgtaatcccagcactgtgggaggctgaggcgggcggatcgcctgaggtcgggagtttgacaccagcctggccaacatggtgaaatcttgtctctattaaaaatacaaaaattagtgaggcgtgatagtggatgcctgtaatcccagctactggggaggctgaggcaggagaattgcttgaacccgggaggtggaggttgcagtgagccgagatcacatcattgcactccagcctgggcgacagagtgagactctgtctcaaataataataataattctgagtgaatagggcctccccaggaactaccaagagacccagaaggccagcccgccttcagcaaagcaagggctggggttccctggtccccactccctccgctttagaaacggctctcggccgggcgcggtggctcacgcctgtaatcccagcactttgggaggccaaggcaggtggatcacaaggtcaggagattgagaccctcctggctaacacggtgaaaccccgtctctactaaaaatacaaaaaattagctgagtgtcgtggcgggcgcctgtagtcccagctactcgggaggctgaggcaggagaatggcgtgaacccgggaggcagagtttgcagtgagccgagatggcaccactgcactccagcctgggcgacagagcgagactctgtctcaaaaagaaaaaaaaaaagaaatggctctcatttttttctgtatgacacaaggcagagacaaacaggaaacaaagagaagctgaaagcaaaaactgtaaagcacctgtcatcttcccgcccccaaacagacactgtttaatagtttgacatgttctttccgctgtttgtaacttgtgattttattattagttccatatttatttttataaagctggcataattagcgaagggctgaacatcttgtttgtaacctagatttattttttcttcctaaaagtttttttgttgttgttgagatggagtctctctctgtcacccaggctggagtgcaatggcgcgatctcggctcactgcaacctctgcctcctgggttcaagcgattctcctgcctcagcctcccgaggacctaggattacaggcatgcaccactgcgcctggctaattttcatatttttagcagagatggggtttcaccatgttaatcaggctggtctcaaactcctgacctcaggcgatctgcccactctggcctcctgaagtgttgggattacaggcgtgagccacagtgcttggcccctcctaaaagtatattacagcttggcagttcctcaaaaagctaaaatagaatgaccataagatgcagaaactctactcctaggtatctacgaaaaggaatccgaagcttggactcagatatttgcacacccaagttcagggcagcacgattctccgcagccacatggtgtaggcagctctagcgttccatcctcagatacacggatcaacacagcgtggcccttccacacggtgaagtacgacacagccgtgaacaggaacgaggctctgactgcggccatggcgtgaatgcactttaaggatgtcacgctcggtgagaggtgccagacacagaaggccatgctgtatgtgatcccatttctatgaaatgtccaggacagggccgggtacagtggctcatgcctgtaatcccagcactttgggaggccaaggtgggtggatcacgaggtcaggagatcgagaccatcctggctaacacggtgaaaccccgtctctactaaaaatacaaaaaatcagccgggcgtggtggcgggcgcctgtagtcccagctacttgggaggctgaggcaggagaatggcgtgaacccgggaggcggagcttgcagtgagctgagatcacgccactgcactccagcccgggcgacagagcgagactccgtctcaaaaaaaaaaaaaaaaaaaaaaagaaatgtccaggacaggccaattcacagagacaggaaggggatttgtgggtgccggggctgggaaggggatggggagtgatggctgatggggatggagcttcatttagggtgacaagaatgttctggaataagacaggggtggtggttgctgagtcatttcacttaggatgatgatctccagctccatccatgttgctgcaaaatatgatttcatttgtttgttttttgagacaggctctcatctccgtcacccaggctggcatgcgttggcgcaatcagggctcactacagcctcagcctcttcagctcaggtggtcatcccacctcagcctcctgagtagctgggaccacaggtgcctgacaccacacgcagctaattttttattttctatttatgagacagagtctcactctgtggcccaggctccagtgcagtggggccatctctgctcattgcaacctctgcctcccaggctcaagcgattctcctgcctcagtctcctgaggagctgggattacaggcatatgccaccatgcccagctaatttttttttttttttgagatggagtttcgctcttgtcacccagactggagtgcagtggcacaatctcggctctctgcaacctctgcctcccgggttcaagtgattctcctgccccagcctcccaagtagctgcgattacaggtgcctgccaccacatccagctaatttttgtatttttagtagtgacagcgttttgccatgtcgaccaggctggtctcaaactcctgacctcaggtgatccacctgcctcggcctcccaaagtgctgagattacaggcgtgagccactgcgcccagctgctaatttttgcatttttagtagagatggtgtttcaccatgttgcccaggctggtctcgaactcctgggctcaagtgatccaccggccctggcctcctgaaatgctgggattacaggtgtgagccaccacgccctgtctctatgcttaactttttgaagagccaccagtctctcttccaaagcgactgaactgttttacctgcccagcagccatacaggagcgttccaacttctccacgtccaactcgtcattttccagtttctttgtttgtgtttttattgccagcctagtgggtgtgaacggcatgatctcattgtggtttcgatttgcatttctctggtcaaaataaatagctttttttttttttaagagaccaggtctccctatgttagcgagggtagtctgaaacccttggcctcaagcaatcctcctgccttggcctcccaaagtgctgggatcacaggcgtgagccaccgcgcccagcctcaacagcattttcaccttcttattctcatagtgtctccctttgcattcctttcctggaaggctcagctttcccagaagcaaagcctggacacggggcctctgtgggactttctttttttatcttttttttttttgagacggagtccagccctgttgcccaggctggagtgcaatggcgcaatctcggctcactacaacctctgcctcctgggtacaagcaattctcctgcctcagcctcccaagtagctgggattacaggtgcgcaccaccatgcccagctaattttttgtatctttagtagagatggggtttcaccatgttggccagggtgatcttgaactcctgacctagtgatccacctgccccggcctcccaaagtgctggggttacaagtgtgagccactgagcccggcctggacttttttttttttttaagactgagtctgcccaggctggagtgcagtggcacaatctcggctcactgcaacctctgcctcccaggttcaagtgattctcctgccccagcctcccaagtagctgggattacaggtgcatgccaccacacccagctaatttgtgtatttttagtactgacagggttttgccatgtcatccaggctggtcttgaattcctgacctcaggtgatcctcctgcctcggcctcccaaagtgctgggattacaggcatgagccaccacacccggcctatttttgctaattttgtgaagaacagtgtcagctgagggcactgactctggatggagacgactcagattctgaccctgactccactgctgcctggctgtgccacagtttcttttcctgtaaaatggaaataaaatggagaccccacctcctggggtccttgtgagcattaagccaagcacggggacaggtgcttggctcctgtacacagcttgagctgtgtactcatattgttatcgctgccatgacaaaggtgcggaagccactgaggctgtgagattccgcaccccgtggaagcccaatggtgacaccccccacagcagggtccttccagcctctggaacacaaaacacctgagtgggaaacccccaggggaccctcagcatgggccactgaggcaggaggttgagaactgtggggagtgctgggcagtggccaacttcctgcctctgccagggcagcacaccagtttcatttgtgtccaccctacttgttctcagggagaggtggctcctttcctggggtgacttctaggctggggcatttaattgctagtgtgagatcttccagggtcttcctctcttggccatagtgacgttcaagatggcaggggaggtgagcagcgccccctagggcctgagaagctcatggagcaagaacaagaaatagacctttcctggtttgcaggtgtgtttacaatttttttgttttgtatttatttatttattttaaaaattttattcatctatttatttttgaatgggggtcttgctatattgcccaggcaggtcttgaactcctggactcaagctatcctcctgactctgcctctctaagagctggcattataggtgtgagccaccatgcctggcccgttttgttttgttttttaaagagatagggctgggcacagtggctcacacctgggaggccgaggcaagtggatcacttgaggctcggagttcaagagcagcctgggcaacgtagcaagaccctgtctgtacaagaaaaagaaaaaaaaagaaaagaaaaacaataaaaaacaattttacgactgggcgtggtggctcacgccagtaatctcagcactttgggaggccgaggcgggtggatcacgaggtcaggagttcaaaaccagcctggccaagatggtgaaaccccatctctactaaaaatacaaaagaaattagccaggcgtggtggcaggtacctgtaatcccagttacttgggaggctgaggcagagaagtgcttgaacccgggaggcagaggttgcagtgagccaagattgcgctactgcactccagcctgggtgactccgtctcaaaaaaaaaaaatttacaaaagtaaaggtcaaactccatgaaaatagagacatggacaatgtggggcaggaaatactgaagagccgcagagaatgaggttcagatgctctgcgcataaagctttcttcctttttctataacaaacctttgtgaatgcattaggccaggcacggtggctcacacatgtaatcccagcactttgggaggctgagccacgaggatcacctgagcccaggagtttgagaccagcctgggcaacatggtgaaaacccatctctacaaaaatacaataaaataaacatgacaaatactgcaaaataaaatcctgaaaattatagcaaggggcaaaaccataagaaatataggctgggcgcggtggctcacccctgtaatcccagaattttgggaggccgaggcgggcggatcacctgaggttgggagttccagaccaccctggacaacatggtgaaaccccatctctactaaaaatacaaaaattagccagccgtgtggtgcacgcctgtaatcccagctactgaggaggctgagacacgataatcccttggacctggcaggtggaggttgcagtaaactgagatggcgcctctgcactccagcctgggggacagagtgaaactccatctcaaaaaaaaaaaaagaggccgggcgcggtggctcacgcctgtaatcccagcactttgggaggccgaggcgggcggatcacgaggtcaggagattgagaccatcctggctaacacagtgtaaccccgtctctactaaaaatacaaaaaattagccgtgcatggtggcgggtgcctgtagtcccagctactcaggaggtggaggcagtagaatggcgtgaacctaggaggcagagcttgcagtgagctgagatcgtgacactgcactccagcctgggcgacagagggagactctgtctgaaagaaaaaaaaaagaaatataagtacggtaaagggaaaaacaacaacttgctcgagataagccctgtttacttgggggcctcgcttttccatgtgtgtttgcccagctcatcctgaggctgcccacacggctgtgggtcctgctttatcacccagcagcagatgcctctgcggctttgtggccaaaccctggccctgcacagcctccttgtggcctgagcttattgcaggctgcacggtgcacattacaaatggtcagttggaggccaggcgcggtggctcacgcctgtaatcccagcactttgggaggccgaggcgggtggatcatggggtcaagagatcgagaccatcttggctaacatggtgaaaccccgtctctactaaaaatacaaaaaattagccgggtgtggtgggggtcacctgtagtcccagctacttgggaggctgaggcaggagaatggtgtgaacccgggaggcggaggttgcagtgagccgagattgtgccactgcactccagcctgggcgacagggcaagactccgtctcaaaaaaaaaaaaaaaaaaagttggttcagcctggcgcggtggctcacgcctgtaatcccagcactttgggagcccgaggcgggcagaccacgagatcaagagatcgagatcatcctggccaacatggtgaaactccgtctctactaaaaatacaaaaattagccaggcgtggtggcctgtgcctgtaatcccagctacttgagaggccgaggcaggagaatcgcttgaacctgggaggtggaggttgcagtgagccgagatcacgccactgcactccagtctgggtgacagagcaagactccgtctcaaaaaaaatggtcggttccccaggaggcggaggttgcagtgagtggccactgcactctagcctgtgcgacatgtcaaaaaaaaaaaaaaaaaaaggccggttcttgtttacttccctttttcttccccacactgtttgctcaaaagagttcaagcgccttctgagtttttcttcaggagacagagccaggcttgaatataatgccaggcaggaacacatggagaaaaggaggcccagattctgccttattttcctgatttttcttttttttttttttttttgagatggagcctctctctgtcacccaggctggagtgcagtgacgcgatctcggctcactgcaagcttcgcctcctgggttcacaccattctcctgcctcagcctcccgagtagctgggactacaggcacccaccaccgcacccggctaatttttgctgtatttttagtagagacggggtttcaccgtgttagccaggatggtctcgatctcctgacctcgtgatccgcctgccttggcctctcaaagtgctgggattacaggcgtgagccaccacgcttggccattttcctgcttgctttcatttttttttgagacagtgtcttgctctgtcccccaggctggagtgcagtggtgtgatcacagctcactgcagccttgacctcctgggctcaagtgatcctcttggttcagcctcccaagtagctgggatcacagatgcccacccaatcccagctaattaaaatttttttaattttttaaaatttctagaagtttttaaaattctcaacaaagtgagaacctagagatagggtcttgctatgttggccaggctggtctgcaactcctgggctcaagcgatcttcttgcttcagcctcccaaagtgctgggattacaggcgtgagccactgtgcgcggccccaatccttctttatttttacctgtttacattttattttatttaactcattattataattcttttagagacaaggtctccctctgtcacccaggctgcagtgcagttgagagaccatagttcactgcagccttgaccttcctggctcaggggatcctcctgcctcagccgctggagtagctggaactacaggtgtgcaccaccatgtccctaatttttaaatttgctgcagagatggggtctggctatgtagccctggctggtcttgaactcctgagctcaagcgatcctcttgcctctgcctcccaaagtgcacaccgggcccacataccctcttttaaatcagagtcagccgggtgcggtggctcacgcctgtaatcccagcactttggaagggtgagatgggtggatcacctgagttcaggagttcgagaccagcctgaccaatatggtgaaatcccgtctctactaaaaataccaaaattaactgggcctggtggcgtgagcctgtaattcccaactacttgggaggccgaggcaggagaatcacttgaacctgggaaggggaggttgcagtgagccgccgagatcatgaccctgaactccagcctggtgacaaagtgagactctgtctcaaaaaccaaacagccaggtgcggtggcacacctgtaatcccagcactttgggaggcacgtagatcatgaagtcaggagtttgagaccgtcctggccaatatggtgaaaccctgtctccactaaacacaaaaattagccgggaatggtggtgcacgcctgtagtcccagcttctcgggaggctgaggcaggagaatcgcttgaaccctgtaggtggaggttgcagtgagccaaggttacgccactgcactccagcctgggctacaggtgagactctgtctcaaaaaaaaaaaaaaaaaatcagtccatcaatcaatcaatcagagtcatactctctgcgtcctctgccagcagccgtatcccctcaaccttgatttcagaagaaaacccaggcatgggccctctatccttgaccaccccacatcctctgctgtccctttcagacagttcaagcctcaccacctccagagaaagatatgcctctttctctccctgctgtccgggaggcccctcaccagtcacagactccccagctcccagcaaagcacctcccaccctggggagtttctggggaacccggccaggtgggccagcagggcgcagttgctgatcctagcgctcatcccacgtggcctggccagtgtgggggtggcccttctagaagcctcacagcattggcaggcggccatcagaggcaggcaggaggaggaagtgagagctgctgcagtcaggatggagggatggggctccctggtcgtggctgttctggaaatcgcaccggtgacctgttcatttcgagcaggctcttgcctctgttcccagaggaggtcctcaacttaggggcgtcattctgcccccaagggacattggatgatgtttgggacatttctggttgtcatgacttggagtgctcctggcatggagtgggtggaggccagggacgctgctcagtaccctgcagtgcccaggacgctgcagtccagcctggcaacagagcgagactccgtctcaaaaaacaaaaaaacaaaaaaaaaagcaatccacaccctgagtggggaaggagagaggagaagcatcccaggagctggggccctcctggttcataccatttgcccaggatgccccaccccagagaacaatccaagcccaatgtccacgggtccgagggaggagaccctgagttaattatttgaaacagagtctgttctctgctcacaccagacaccagaataaactccttttttttgagatggagtctcgctctgtagcccaggctggagtgtagtggtgcaatcttggctcactgcaacctccacctcccgggtgccagttcaagcaattctcctgcctcagccccctgagtagctgggattacaggcacgcgccaccatgcccagctaatttttgtatttttagtagagacggggtttcaccatgttggccagactggtcttgcactcctgacctcgtgatccacccgcctcggcctcccaaagtgctgggattacaggcgtgagccaccgtgcccagcctcaggataaactcctaatggggcaaacggtataaaccaggaggcccccagctcctgggatgcttctcctctctccttccccactcagggtgtggattgctttttttttgttttttttgtgacagagtctcgctctgtcaccaggctggagtgcagcggcgccatctcagctcactgcaacctctgcctcaaggtgtggatttcaacgtgcgcagtctcctgggacctcagcagggcagaggatcatgggatgcagagtctcttgggggggtccgtggaatcccctaactcgggagtctcacccagggtgattctgcccccgccaagggacactgggtgatgtctgcggatacttgtggttgtcacaactgggggtgctcaaggcatggagtgggtggaggccagggacgctgctcagcgccctgcagtgcccagggcggccccaaatgtcaaccgcaggagttaatttctgcctcaacacctgaatagcgaatgctcgtagcagagatgcaacaacagccttctggtgcagtacgaaatctcgaaagacaggcaggcgcggtggctcacgcctgttaatccccaaactttgggaggtcgaggcaggcggatcacctgaggtcaggagttccagaccagccttgccaacatggtgaaaccccatctctactaaaaatacaaaaattagccgggcgtggtggcgggcacctgtaatcccagctcctcaggaggctgaagcaggagaatcgcttgaacctgggaggcggaggttgcagcgagccgagattgcgccactgcactccagcctgggtgacagccaggcccggtcgcaaacaaaacaaaattaaaaccatgaaaggaatcaggatttgccaggagtagcatttttgcttggtaagaacaaaattttgtttatacatgaaataaaaaatattttattaaacctcactgcaaagtggcaactttttgctaaattcataatttagtctacacacaagctatgtacccgtatgtgactgccaagagttatatctttgcttattaaaagcaaagtgcagttcatacctgagattttttttctggatttaaccaggaggggaaatatttttgctaggtaagtccacattttacctcacaggcgaaacagtttaccgaacttgaccaccaaagaaatcgttttttccttgggagatccacattttagttcatacatgagatgtgtttctgaattttaactgccaggagtagtgtttttccttagggtaagtttcagtttccacaggaaaaatctgaatttatctgcaaggagtaaaatttttgcttaagtccaaattgtacacgaaatattttactaaatttgaatatctttaacattggaagttctttttttttaaacactggaagcattttaagaactgcaagaccaaatttaaaaaaataaaaccagtaatatcatcgatgattaccaggtgttactggaaataattctggcgcggttggacaaccccccaagcacccgggggcctacccaggggaggggtcccgctgcgtgaagggaccctagggagggcgacgtggaccacgacagacaaacgggcactcgaagacccccgaaaatcggccccagcgagccgcccccgcccccaaggcacgattgtgggggcggggacggctcggggcgcgcgcagcgcgtacccggcgccacggcagccccgcccccagaaggacgcgcgcaggagggggcgtggcccgaggctcaccaaccaatctccagagagcctcttcctttccctttccctttcaccaatcaggcgctgggaggggcgggcgcgactttttttcccggcggccccgcggctctgcccctcgtgcggtcgcgttcccggcggcgcggggggcgtggcctgggcgcagcatctataaaggcgggcggcggcagaggcgccattttgcgaacggcgagcagcggcggcggcgcggagagacgcagcggaggttttcctggtttcggaccccagcggccggatggtgaaatcctccctgcagcggatcctcaatagccactgcttcgccagagagaaggaaggggataaacccagcgccaccatccacgccagccgcaccatgccgctcctaagcctgcacagccgcggcggcagcagcagtgagaggtaagtgccccgcccccgtccgaagcttccagaagcgccggccgcgcaggcctgcggggggccgtcctcggggcgccagataggtccccggcgcgcgagatccgcccctttgtcaaggccagaatcgcgccggggacgaggtaggcgcagggcgggcctggaggtcccccccggccttagcagtgctctcgggggagtcgggtttggggggcaagggtgcggagttggatttggggggcaccgtccggggcgcctgatttgcgggaggggcatgggtcggaggtcggatttgggcgcaggacggggagtcgggggaggcgtgtgtcttttgcggggttcgcgggatgggactcggcttcggaggaggggagaggcttctggtcgagggttggatttgcggggcgcagactgggaattcggtttggaggaagggtgtgcggtcgggtcggatttgggaggcgcaggatggggcaatctggttgggggcggggtcggccttggggggctggtccgcggacaggcagggcccgcggggctggtgaatctgcacttttcggtcccggccgtcgagcgtgcgctgcgggagcggggagcgctttgcggtggacgagctcccgcgggtccctgttgcctcgatgtggcccctgcacgcgacggacctcgtgggccccgtttttcgcccctgagcgagtcggtctggatggcccgggacgcgccgggcgaggccgcgcacgtagacggcacccagggcttctccgcgggggccgccggggagctgggggtggcgcactccgacagcccggcagcgccctgggaagacccccgccgcttcccgggaagacgcgtcccgcttccgggggcgcgggtgccagctgcggttgtgggggagcccgcggggtctcggtcgagctttcccgactgcgtcccccgaggtgggcgtcgctcagccccggatcgggaggttgggccgcggtgctggcggtgccgcggtttgggggccgtgcaaaatggaggcaactttggggcctgtttaccctgcgcagcaaatggctgctggcgctgccggctgcgcgattgtgaaaatctcccccggggcgcgaggccgcgtctgcctggatgacgcaaccgggagggcccgggcctggagcgggggcgggggggcgggcggccgggagccggagcggggcgcgtcctccatgaggtcaggctaggcccgcccggtcttcgcggggacaagcaagagtcccagattttggccgtagtgcagggtggaaaggggaagccgcgacagaactgaaaaggggaagcgctggctgtcttggtggccggggggtgaggctctgccccggcggggctgcgtgaggggaaggggccccccgccctgggaaggttgggctgtcctgggcggcgccgcccgaggagtcggggctcagtgactgctgcccttgtaggtgcttggggcaggcgttggagctgccttcgggaagcctcgggggtgtgggaccgggtgggcccctgcctgggcggggcggggtcttttggccgaggcaggggtggggatgtgctgaaggccgcccggacgccctggaggggtctccgcccggagcctggcgctgcctcgtgacctgcatcatcttcagttccagggtctccctccactgctgtagtaacccgggtccggggcctcggtggtgctcctgatgcccctcacccacccctgaagatcccaggtgggcgagggaatagtcagagggatcacaatctttcagctaacttattctactccgtgagtatggggccgggcctgctggggctgctctggggccacaggtactttcttgtgcaccttgctgcccgtacctgtgattgaatgtaatcgtgggaaccctgagtttcatcagagccggcgcacagtctcctgcagcccaggcgttgcctgagctcaacacggcctaggcccaagctttagcgctgccgggttcttggagtcctgtggggtgagtcagggttctgaattgggctgcaccccctggacaggatgatcggctgaatgtaacagaggaactaacgtccaacgacaagacgaggattctcaacgtccagtccaggctcacagacgccaaacgcattaactggcgaacagtgctgagtggcggcagcctctacatcgagatcccgggcggcgcgctgcccgaggggagcaaggacaggtgaggggcaaggacaggcagggagtgctcacccaggggagcagggaccaggtgaggggcaaggacaggcggggagtgctcacccaggggagcagggaccaggtgcgggttgctgcccaaggggtgcagggacagatgagggagggcactgccttcaggcagcacatatgggggccaccatcgctttgttggtggggacagggtccccccttttttttttttttgagatggagtcttgcttttgttgcccaggctggagtgcagtggcatgatcttggctcactgcaacctctgccttccgggttcaagcgattctcctgcctcagcctcccgagtagctgggcttacaggcgcccgccaccgatgcccagctaatttttgtgtttttagtagagacgaggtttcgctatgttggccaggctggtcttgaactcctgacctcgtgatccgcccacctcggcctcccaaagtgctgggattacaggcgtgagctaccgctcccggcctggggtccctttttaaaaagtgcactccaaattcgtaccctgggattctaccctccaagggatgccaggcagtgtcagagcttttctgtcatggggcatgcacgtgggtgggtgcagcggtgctgctcaacactgtggtgtcaggacggccccacccagaggacgatctgggccccagggggaccctggagtagagcgggcctcagggtagctgctaaggcccaggaggtaggcaggtgggtcgggccagccgagacgctgacactcgctgcagctttgcagttctcctggagttcgctgaggagcagctgcgagccgaccatgtcttcatttgcttccacaagaaccgcgaggacagaggtaggtgacccgtatcgcctgcagtagggtgcgtgggggtgcctgcgccgccccttcattctcagcccgcaggcacggtctccctgcgggggtggggggtgcgggcggggggttctggtcggcaggggttctgacggcttctcccccgcagccgccttgctccgaaccttcagctttttgggctttgagattgtgagaccggggcatccccttgtccccaagagacccgacgcttgcttcatggcctacacgttcgagagagagtcttcgggagaggaggaggagtagggccgcctcggggctgggcatccggcccctggggccaccccttgtcagccgggtgggtaggaaccgtagactcgctcatctcgcctgggtttgtccgcatgttgtaatcgtgcaaataaacgctcactccgaattagcggtgtatttcttgaagtttaatattgtgtttgtgatactgaagtatttgctttaattctaaataaaaatttatattttacttttttattgctggtttaagatgattcagattatccttgtactttgaggagaagtttcttatttggagtcttttggaaacagtcttagtcttttaacttggaaagatgaggtattaatcccctccattgctctccaaaagccaataaagtgattacacccgatgcacctggctctgtggtggtgacgctggggactggtgggaggagtgcctgggaccacagagggccctgggtggaggggtcgcgggggatttggcacccaggcagctgcgggacccctcccacggaggagaccccctgggctgggaggccgggccctcagcttggcgccagccttgccactgctcgcttgaagccccttcctgcctcgcgtccccttccgccccagcctgggcctgcgcatggggatgtctgtgctcccaactcaacttttgagttcgccgtgttactggccgcccctagggacctgcagcgccgttcggggcagcagcacttccggcggggtcgtggcctggagcgcttccgggtctgcaaccccgccgtctgcccggccgcagcgccacctgccggccgcatccgggagcgccacccggaaaatcagggccaggcctggccgggaaaccggctggaaagaggaggaaaggaggaactcgaaaagattgtagacttggcgagcgggccggggggatattcagccgtctgagcggtggtggggtcggccgggaggacaaacctggacacagatacccccagctcatttgggcagcgcaaatgcagagaaggggcattagagctgaggccatgcaggatgaataggagtatgaagcagagtagagggggctgttttctggtgtaaaaaacaacttgggcaaaggcgtggaggctggaaagtaacctccagggatgaacgacatggggttggagactctgaggagactttggaagagccctgtatgtattctgaggcactggggagccatgggaggtgtttgagctggagagggacctcatatctggggttggaaagatcctcccaggactgccatggggaatggaatggaggggcaactctgagtctccaggaaggaagccacaggcaagggcagtgcagtgtgtcagaggcataaaggaagactccatccccctccagtgagtctcctctgtgcctgtttattacatcatcctgtggtattaagtgagcacctactgtgtgccaagcctggcctttgcccccagggaactcacagccttgtggacagtaacagaggaataaatgctcctgagagtgggcggagaacgcagggtaaggagctagcgatggcccagagtgggcacctttatttgtttagagaaagtgaaactgtagccgggcgcggtggctcacgcctgtaatcccagcactttgggaggccgaggcggacggatcacgaggtcaggagatggagaccatcctggctaacacggagaaaccccgtctctactaaaaatacaaaaaattagccgggcgtggtggcgggcgcctgtagtcccagctactcgggaggctgaggcaggagaatggcgtgaacccgggaggcggagcttgcagtaagccgagatcgtctcaaaaaaaaaaaaaaaaaaaaaagaaaaagaaagtggaactggaacagtatggcagagggaacagcctacacaaatgcttgggggcgcgaaagaagttggtgtgtcacggaggaacagggagggaggcagggtgggcgcagagggattgaggggaggtggcagggaaccgcggggactgttttagggaaggtgagtccagaccccgctgagatgagctgggtgtctaaggtcccagggagccttcccttcccgtgacaccaccaagcaattctccaccagggacaggggcattcacatgcccaaaatcactggccatcttcagcacaagggggtgctccagagccaggaatgcctctggtcccggcattggcctctcatggagacaatgacagaacccacgcggaagagcgccctggctgctggggaaggcagaacacagagagacattgatcagcggggttgtccacacctggaagtggcgtgggggccctggcttcagagagctgctgcccaacacaggaggcgctggccagcccccagccctggaggggcagctgcattcctgggaagcccttgacccacatccccagcacgggaggggaggctctggagtggggcattgctctctctgctgcgctcctggactctgcaggaagagggtgtcttggctatcatggagacgctgacctcagccccagccctgcctcctgggcaggcctggaccaggtgtgttcgccctgggttggggtcagtcccacagcagcgccagggcctggcccatcgaggactcggtggcctcggccaggtattcgcaacacagccagtcctcgaggctgggagcttccccacctgcggcccgctctgctaggcgcaggaccagcagcccgcggcgcacccgcagccagggcccgagcgctcggagccagggaccaagcggtgctccgcggccgcgcagctcaggcccgggcccccagagcagcgcctgcagcgcgccccgcgtccgggacgccgagggccgcaagcgggtcagctgtgctgccaggagctccaggcccgcggccaaaggcgtggtcgagggcgcagcaaggctgagcagcgctcggaggaggctgcccagctgcggcgcgtgggggcccggggatcccgggggtccagggggctgcagacagacgcggccaaagtcagtgaggagcaggcgtgggggccccgtcgtcgcacagccccgaggtgccaccagcagcaagttctccggccgcaactcgactagggccgcgccccacgcctccaggaacttcagggccgcgctcagctgcagcagcagcagggccacagcccacacgaactcctccggcggctgcgtgcaggcctccgccagccactgcgccaccgtgcgctctggaacctcggctgccagcgccactgcgcctctccagggcgccccgggcagtgtgccttcaggcaccaggccacacagcccctgcagattgaagtgtggagacagggaggcctgcagctccaggccccacgggtggggcacgtccgccccgggcttgggcacctgcaaggcagagggggtgtcggggcctggatcactgggccccccacaagcaccgcctgccccagtgctacctgccccgaagcctcccacgcacacccccaaactgcccccactacggctaggggctgcctgcatccctccagcagcaggaggtcagtgttaatttggaagttagtcaccagtaaggactttcaggaaagttaagccagggaagaagatgttcctgggcaatgagttcgaaagcagattcctgggccgggcgcggtggctcacgccttcccagcactttgggaggcagggggatcgctgaggtcaggagttcgagaccagcctggccaacgcagggaacgctcgtctctactaaaaaatgcaaaactagctgggcgtggtggcgcgcctgtcatcccagctacttcggaggctgaggtgagagaatcgcttgagcccgggaggtggaggttgcagtgagccgagaacgcgccactgcactccagcctgggcaacagagtgagactctgtctcaaaaacaaaaaacaaaacaaaaaacacaaaagcagatccccggccagagaggtgtgggaggggttttgacaagagctccaaggccatacccatggccccatactttagaaacatggtttcctgggttaactgcgttgattcacgtgttagttgcaaaataaacaagtctaatatggtctggatctgtgtccccaccaaatctcattccccagtgttggaggtggggtctggtgggaggcgacttggatcttgggggtggtttatcatgaatggctcagcaccatctcccttggcactgtcgttgggataacgagtgagttctcgtgagatctggctgtgtaaaggtgagtagcacctcctccctcccttcctcctgctcccaccgtgtgagatgcctgctcccgcctcgccttccactatgattggaagcttcctgaggcctccccagaagcagaagccaccagaaccatgagccaattaaggcccttttctctataaattacccagtctccagtattcctttttcttttcttttcttttttcttctcttttgtttttcttttttgagacagagtctcactctgtcgcccaggctggagtgcaatagcccaattttcgaatctcagctcactgcaacctccgcctcccaggttcaagtgattctcctgccttagcctccaagtagctgggacttcaggtgcgcaccaccgcgcccggctaatttttgtatttttagtagagatgggggtttcactatgttggccaggctggtctcgaactcctgacctcatgatctgcccgccttggccttccaaagtgctgagattacaggcgtcagccactgtgctgcccagcctttttttttttttttagacggagtctcgctctgtcgcccaggctggagcgcagtggtgcgttctcggctcaccgcaagctctgccccctgggttcatgccattctcctgcttcagcctcccaaatagctgggactacaggtgcccaccaccacgcccggctaattttttgtctttttagtagaaacagggtttcaccgtgttagccaggatggtctgtatctcctgacctcgtgatctgcccgcctcggcctcccaaagtgctgggattacaggtgtgagccactgtgcccggcctttttcttttttttttttttgagacggagtctcactctgttgcccaggctggagtgcaatggcccaatcttggcttactgcaacctctgcctcccgggttcaagcaattctcctgcctcagtctcccaagtagctgggtttacaggcgcccgccaccacacctaatttttgtatttttagtagaggctgggtttcaccatgttggccaggctggtcttgaactcctgacctcagctgatccgcccgccttggcctcccaaagtgctgggatgacaggcgtgagccaccgcgcccggctccagtatttctttacagcagtgtgagaactgactcacagaaaggccaaatgaaacaagccctgggttatgtctaagatggggcactggggacacctcagagagggtggggctgtggggctcaccttggcgaccaggatgtgccaggcgtcctcgtgcgcgcgcaccacgcggtaatacagggcgtccccgctctctgcgcagggtgagctgtctaggaggcggaagctgtggccggggtggcagggcccggggtggccccccatgagccgggcacggagccgggcatagatggtacggaggccctgcagctgccgcgcagccagtgcagtgtgcacagcctccgggctgtgcagatcgcggagggagaggcccagtggggcgtcagccgggccaaaggtcagctctgcagggagacaggctggtcccactgcagcctggctcttgtccacactgtgggaccccagaaagggtctccgaggcggctgtacttggatggagctgggatggagggtcctgcgggtgggcagtgactgggtccgggttaggatcttcttgggcaggggtgggggcaggggctctgggttggtggagagggacccaggggtccggaggcggcaggccttggagggcagcaggtgggcacggatctgacctgcagggagagacagtgggggagggttgaggacaggcggagtgggaacgggacacgtgactccacctctcagcctcggtttccccatctctaacatggaagtaatgaggctgggcgccggtggctcatgcttgtaatcccagcacttaggaaggtggaagccgaggcaggaggatcactggaacctagggtttgagaccagcctgggcaacatagtgagaccctgtctctgcaaaaattttttaaaaatttgccggacgcggccatgcacaatggctcatgcctgtaattccagcactttgggaggccgagatgggtggatcacgaggtcaggagatcgagaccatcctggctaacacggtgaaaccccgtctttactaaaaatacaaaaaattagccgggcttggtggtgggcgcctgtggtcccagctactcgggaggctgaggcaggaaaattgtgtgaacttgagaagtggagcttgcagtgaaccgagattgtgccactgcactccagcctgggcggcagagcttacagaaggggaaactgaggcttataggaggatggatcagtttcagagagtgatgccacccagcactcagcgactcccacttacctccgtggctttgcacaagcgtctgtcttgctttttttcttttttgaagtcttgctctgtcgcccagcctggagtgcagtggcacgatctcggctcactgcaacctccgcctcctaggttcaagcgattctcctacctcagcctcccaagtagctgggactacaggtgcccgcccgccactatgcccagctaatttttgtatttttagtagagatggggtttcaccatgttagccaggctggtttcaaactcctgacctcaggtgatctgcctgactcggcctcccaaagtgctgggattacaggcttgaaccattgcacctggcctttttttttttttttttttttttttttgagatggagtctccctctgtcgcccaggctggagtgcggtggctcagtcttggctcactgcaccctctgcctcacaggttcaagcgattctcctgcctcagcctcccgagtagctggaattacaggcatgcaccaccatgtctggctaatttttgtatttttagcagagacaggttttgccatgttggccaggctggtcttgaactcctggcctcaagtgatcctcctccttggcctcccaaagtgctgggattaaagggtgggattacaggcatgagttaccgtgcccagcctctctctctttttaatggtatatatttttttctatttcatggctcactgcagccttgacctcctgggctcaagggatcctcccacctcagcttcccgagcagctgggactgcaggctcttgacaccatgtccatctcattttttttgttttgtagagatggggggcgggtctcattatattgcccaggccggtcttgaactcctggcctcaagggatccacctgcctcagcctcccaaggtgctgggattacaggcgtgagccaccacgccccgcccaccaacccacaggttatttttcagccctggcctactccgggccttcccggaggtcactcattttaccagctgctgctgttcccagaggccatggtgcccggcaacctcctgccgctccctgcacccacctgccgctccctgcacccccctgccgctccctgcacccccgcagcccagggctccctggggagctgcttaccaaggttgctatacgtgggctgagtcgaccaggtggggttgtcgggctcggggggctctgtggggggctccgggctgctcatgttgctggggaaaggtcaaacggggcgtgtgtggggtgaccgtgtgcacgcacagggcgacatggggaggggtccgtgagtgctggggcctgggagaccgtcgaggcctcctgctccagggcccttggtgagaacaggcgcacccacactccactcccttgtccagttttgaccctgctgtgtgatcccgagtgggtttcctgtcctctctgggcccctgctgtgtgatcccgagtgggtttcctgtcctctctgggcccctgctgtgtgatcccgagtgggtttcctactctctctgggcccctgctgtgtgattctgagtgggtttgctgccctctctggggccctgctgtgtgatcctgagtgggtttgctgccctctctgggcccctgatgtgtgatcccgagtgggtttcctgccctctctggggccctgctgtgtgatcccgagtgggtttcctactctctctgggcccctgctgtgtgattctgagtgggtttcctgccctctctggggccctgctgtgtgatcccgagtgggtttcctactctctctgggcccctgctgtgtgattctgagtgggtttgctgccctctctggggccctgctgtgtgatcctgagtgggtttgctgccctctctgggcccctgatgtgtgatcccgagtgggtttcctgccctctctggggccctgctgtgtgatcccgagtgggtttcctgccctctctggggccctgctgtgtgatcccgagtgggtttcctactctctctgggcccctgctgtgtgattctgagtgggtttcctgccctctctggggccctgctgtgtgatcccgagtgggtttcctgccctctctgggcccacttcctcaatcatgaggcaggtctgtcacccatcaattttccaggcagtgggaaggacccccctctgcacgtttgggatggggacagagtgttcagcctgaggacaggcctttgggggtcagttgcgggggagacagtgtccagggacccagggatccacactcaggcctcatccccgagggctcagccgtgcggttgctgccggcagccaggcctcgacccacccccgcccagatcccaacctcaaaaagtggccgcttctgtccagctccccgctccaggagccccctaccttcaagactggcgtgccctctgggggaggaggggtccgtggggacaaactcccaatggccacagcccctggcctcgcaggaggggtctgacctggcgccggcagctgacaggaaaacgtccggcccactgtcagaccgcagcccggggtggggaggggacatttctgcaacacttccccagcagccgaggccgccgcctcccctgcccgcccgcagaggacaggatgtaaccgggagggaacagcctggacagagaccaggaggtgggatctgaaagtcaatagccccagggctgacagccgggtgggggcagtggaaggccccccacagcctcagaggccaggctggggtgcggggcagtggggagccctgtgagatggggagagaggggcagagctggcccaccgtaggggagcgcacagaacacggtggcggctgtccctggagaaggtgcaagtggggtctgtgggtttcacttccccgggaaccacctcccctcctgcggcagcatctgaggagcccccagcggccccctgccccatcccagggcccccgaatgtggagcgtgggcgaggaccctcccggctctgccgcgcctcgctgtgtgactgcgggcaaatccccaccctctccgtgctccggcgaagaaagaagagtggctcccacatcccgcctgctaacagccacgcctgctggatttttctttgaaaagatggaatcggctcgttttcccccttcccccttcctcactgcctcgatgcatttatttagaaaagacgttttagataaaatcaccataaatggaaaaatcaagaatggaaaaaacccaaggaaaagcagacgcggggtgaaattccagctgaactgcgtgcctgtcaaaactgtctttttctttggagacagggtctcacactgttgcccaggctggagcgcagtggtgcaatcccagctcactgcagcctggaacgagctcctggggcgatcctccctcctcggcctcccaaagtgctaggatcacaggtgtgagccaccctgcccggccccaaagatgtttttgctgcaaggattgagtgtattttatgtgggatccccgatcccgtttcccttagggaaaatgggcccagaaagagtaggggctccatccagggtcacgcagcagctcgaggctgggagcagaggtccacagagccactgctgagtccccctggcctcccccaatcccctgagaaggggcaggaggggaaggagactacatttttcttatgaacttcccttgagtgggtcccatgccacacttttttttctttgaggcagggtctagctccgtcccctaggctggagtgccgtggtgtgatcatagctcactgcagcctccgcctcctgggctcaagtgattctcccacctcagcctcctgagtagctgggaccactggtgtgcaccaccatgcctggttaatttttattttatttatttatttttgagatggagtctcactctgttgtccaggctgcagtgcagtggcgcaatcttggctgactgcaacctccgcctcccgggttcaagcaattctcctgcctcaggctcccaagtagctggtactacaggcgtgcaccaccacacctggctaatttttgtattattattattatttttagtagagttggggtttcaccgtgttggccagcctggtctcgaactcctgacctcaggtgacctgcccgcctcagcctcccaaaatgctgggattacaggcgtgagccactgcgcccgccacagagtttaaaatgatgcaaaggctgggcacatgcctgtaatcccagcactttgagaggctgaggtgggtggatcacttgagcccaggagtttggtaccatcctgggcaacacagtgagaccccatctctacaaaaaataaaacatgagcctggcacagtggcgtgtgcctgtggtcccagctactcagaaggctgaggtgggggcattgcttgagtccaggaggtcgaggctgcagggagctatgatcataacactgaactccagcctgggcaacagagtgagaccctatcacaaaaataaatcaataataaataataaaacaatgcaaaaacagacaaacatgcacctcagtaatcaagataaacatcattttactgaatgtttcacaaaacctaaccggcaaactatgggccgagcctctgtttttgtcaataaagttttattggaacccgggtggaggagcagggtaaggcaaagagaagcagggttaaacaagtgcagatcagatcctgtctttatttaaaatattgataggccaggtgtggtggctcatgcctgtaatcccagccctttgggaggctgaggctggtggatcacctgaggtcaggagtttgagaccagcctggccaacatgctgaaaccccatctctactaaaaatacaaaaaaaaaaaaaaaattattcgggcatggaggtgggtgcctgtgatcccagctactctggaggctgaggcaggagaatcgcttgaacccgggaggcggaggttgcagtgagatgagattgcaccactgcactccagcctgggtgacagagcaagactccgtttaaaaaaaaaaaaaaaaaggctgggcgtagtggctcatgcctgtaatcccagcactttgggaggctgaggcaggcagatcacctgaggtcgggagatcgagaccatcctagccaagatggtgaaaccccgtctctactaaaaacacaaaattagccaggcatggtagcctgcacctgtaatcccagttactcgggaggctgaggcaggagaatcgcttgaacccgggaggcagaggttgcagtgagctgagatcgtgcactccagcctgggtgaaactctgtcttcaaaaaaaaaaaaaatgttggtagcgtggtgtggcctctggatcaggcccctccagatcctacagctgtcctttcatttgagaagcccttattgagccatgggagctggggccacattttctctggatccccagcatcacccagtacggggcagggcagggatgccgtatgctgatggatttttacatgacatcggccttttggagaaaaatgcctgtgttttgtttgtttgagacagggtctcactctgtagccaggctggagttcagtggtgcgatctcggctcactgtaaccttcccctccccggttcaagcgattctcctgcctcagccccctgagtagctgggattacaggtggccgccaccacgcccagcaaatttttgtattttcgaaaagatggggtttcgccatgttggcgaggctggtctcgaactcctgaccacaggtgatccacccgcctcggcctcccaaagtgctgggattacagacgtgagccaccatgcccagcctattgcaggactattagcttccaaattacagacaaacaaaccgaggcacagagaggggcagtgacttgccccaggccacacagcaatggaagccggagacctgagcctccagcttcccttggctccacaagcaaaagctcacatgtgggaattgtgcctctgtcttgtggaggaaaacaggaggaagttcatacgcagggctcaggaatcacctggaaaagatgccggcttgtcgggggatgtgggagagagagagacaccccaaacgcgtgtccctgtccagaagatgggggtgagagatccacgagggtgccggcatgggctggggcaccccgagtgctgtcctagctccgtctgggaggggaagtcaagtcaggcttggtcagaagccacccagacatggggcgtgaggatggcttggtctggtcctggttttaggggtcccctcttaggtttccagccaccaaggagatgggtgttactttagctgggtcttggctgcctgagcagggagggcctctcagctggggtctcccctgccctcccccgagtgcaccccataaatgagtcagggttcatggaaaccttggaggttgcacctggttcatgtcaggcactcagagcattgcacagggaagaggcggctctcctggacggggactctgaggcctacaggacaatagtttcacctgcctttgctgtaggagagaacgggaaatcagtccccacgggagagtcccacagcttagagcccccctcaccctccagctgccttgaaaccaggcatggagagagggccgcctcacagtccctgacaggcctctgttctgcccccgaagggcagggaaataaaggaaccttagtcccaggttcaaatgggggaaccgaggcccagagagtgacactgggctgtggcgagtgggagactgctcttggccgggtcttctgcatcctagttccgtccacttccatcctgaaaaagcacaagcttctccctgtgccttcccgggcgggtggggtttgagacttcatgcccactgtgcctcagtttccccacctgtcaccgctccgtgcctcggtttctccatctgttgccgctctgtgcctcaatttccccatctgtcagtgaggactggggtggggctaaagcactttattagtctcacttccaaagccaagactccctggcttttctcggagccctcagagacaggcagggcagacatgggaccctgtcagcagcacccagactccccgacagaccaattccaggaggcacagtggggacccatgtcttctttcttccccggcctgagtttggggcaggagtttcccaatggcccagctttgcccactcttctcagcccccacctgtccccagctggggtctcagagcggcttccctccaccctctgccccttgctcgacccatctgtaaaatgggttcgttagcaggacccacccagctcacagggctggcctcagcgtgaaaggagggaacacacacagcgcctggaacagcgccgggaacagcatgggcgctgcagaagtgtggcctatcacatgtcactagtggcgtggaattccctcagggttggcttcccctggggaccccagcagcccctcatccctcagccctgccccctgttgctcccatgggagtaagaacaaaatctgaagtttgttattaaatcggttccatttttattggatttgaaccaaatacagcaggatgaggggtgggggtgctgaggggtcttagttcatgttgggatggggtggggggctcagggggctgggaaatcctaatatacggatgctctgtgaaccctaacctggccgagaatgcaccccctcctgtctttgataggctaaaggcacttggatatcaattctggggggcccttggggttgtcatggtaagcagagtcagacaggtgctaagaaaaaaattggttctgcccaattcaggggtggcggttggggttgcacgaacttcagccctcactcatgtcgagccccctgggccatctgtacatcgtggtgctggcctgggccctcccggccacagctcagggagaacgggctgttgtctccttccagctccttctgaaacttttgctcaaagccttcagggctgagccagctttctctctgtttctctctggctgatcgatctcagagcagtcttcagggatccaggatccaagtcaagccatcaagctcatctgcaggcctggcctctgaatacagggtaataggtttgaccctcagacccattttacagatgaggacactgatggtctaggtggtcttcagtcaccagctgagatcacatagccgggcaggagcagagctgcttttgagcccttcccgcaaagtcctggagggtctgtcctaacctcttggttggcagccaagcccctttctggctgaggttttggcccaacagtggttcctgtccctgcccccagcaatgtcctaactgtcctctggaggatgtggaggggaggggcaagaactggctgtgaggaggccaggtcacagatggtccctgtggtcccggtctggtgcctgaatccttctgcaaaacctcagctcctgcttgtttgccccccgtgacaggatgcccaccatctgcagagcaaccgggcggtgacctcagggaagctcttccttgaccagagctgcagtcggcctgtgaccccagctttggtcctggatctgccccacctctgcaggtgcagagacccagcttcctccatcaccttctcccgaggacccgggtccaggcctccctgcagggtgaagcccttgttccggccttgttcttgtcactacactgcaccgcacgtagccgggatccccgggaaccccctgtgctctttggtctcgttccccacctgagccacgggtcagcagggccggccatgatggggccacgctcagggcttgtctgaggccggctcagaggtcatgtgtacctaggggcaaaagtccctccagtagacccatttggaaggacactcagcaccccagaagccatggttctgggccggggcagggtggccacctctcccttgtggggtggccctctcttgcctgctgttctgggaagcacgtggcagcggagggaggcggagggctggggtgatggctccttcttgtggacagccctgctgggctgtggggaggacggaggacagggcgtgtggacccctgactgtgaccaccgtgtgtgctgggtcctcagcaagacctgagcccaggccccgaggtcggctgggagatgctcagctgagcaggcgctggggtgggctctgtgtcccaggtgtgagctgtgtctcagttatgcgttgtgcctgtcccaggtgtgaactgagcatgtccctggtgtgagctgtgctctcacgagagccctgcctgcctctgtggtcagctctggtgcccagggcttggttttagtgtcagctgggtgtgagggtgtgtgtctcgggtgtgagctgtgtgtgtcccagatgtgagttctgtgttctgggtgtgagctgtgtgttccagtgtgagctgagtgtgtcctgggtgtgagctgtatcccgggtgtgagctgtgtgttccactgtgagctgtccttgtatcaggtgtgagctgagtgtgtcctgcgtatgagctgtgtgtcccgggtgtgagctctgtgttccgggtgtgagctgtgtgtcccgggtgtgagctgtgtttcccgggtgtaagctgtgtgtcccgggtgtgagctgtgtgttctgggtgtgagctgtgtgtgtcctgggtgtgagctgtgtgtcccgggtgtgagttgcgcctgtcccgggtgtgagctttgctctcacgagagccctgcctgccccctgcggtcagctctggtgccccgggtctggttttagtgtcggctgggtgtgaggtgtgttgcacctgtgtgattgggttccaggtgtgagtgtgtctctgggtgtgaggtgtaggacggccaggtgtgagcaatgcagactttctgcgcaccctccccttggggctgtggggccctttgtgggacccgggtgtccaccgtctccccgatgcgatctgtgtacaaagggctgggggagcggaagcccagggcttgggggcagcagtcttgtgcctcctgggtgtgaattgcgggccctgaggatcctggggtctctgagcgcccccagccaccccgggttggtagacgggagcccatccccccatccttgcagcccgcacccccaccccccagctcagccaccatagcagggacaggaagacgggttgaaatctttagaaaacgcttgagaaactgcaaaaaagacgcatgctgatgaaaaacagtcctgcggttgggcgtctacaaaaaaaggggaagttctgcctggggagcgccgtgcagccgtccccttcccctccgggaaatgcataggtggacacgcgagcggccggcccgcgggggaggggaggggagggtccgccctggggacccctcagatcatcttcatgttgaacttgcgcgcgcctccctggcccgccgcggcggccggcccatccaccttgcggaaggagtactccaccgagaagttgtttttgtgctgcccgcggccgcggctccacacgaacagcagcacgaagcagaagaggaccacgcccaggaaggtgatgcagcccatggcggtggacaccaggatggtggtgaggtcgagcggcgcgcgcagggccgccagcgtctcgttgtgggcctcgcccggggtccggttggcggccggctcggggcgcacggtcagcgtggcgaagtaggtgtcgttgccgcccgcgttgctggccacgcacgtgtaggtgccgctgtcctgcggccgcgcgtcctggatctccagcgtccccccggggagcacgcgcgcccggcccgcgctggtggccgtcaccggccggtgctggggggtcacccaggccacggtgggcgccggctcgccctcggcgcggcagaggaagcggacgtcttcgcccgcggtggccgtgacgcgctgcagccgccgctcccggatcttgggtttgcggcacacgaagtactcgaacagcacggagtccggcaggtttcgcagcgcgtcgccgcgcacctcggccggggtggcgcaggccggcagccgcccgtcgaagttgagggtcttgcgacgctgcacgatccacagcaggcgacagtcgcaggccagcgggttcccgtccacgcgcagcgtctctagcgtgttcaccgagtggaaggtgctctcctccaacgtggagagcaggttgttggagaggttgagcaggcggatctggcgcaggcccaggaaggcctgcggctccaccacagccagcagggccccggccaggtgcagctcgcgcaggcggaccaggtcccggaacgacccccgcggcaccgtgctgatggggttgtgcgacagattgaggcaggtgaggtgcgcctggtgccgcagcgcggcggccggcacggcggtgatgttggtgtgggtgaccgacagcgaggtcaggttcaggccccgcaggctgcccgccgccacctcctccagcagcggccagttgtcaatctccaggtgcagcagcccgggcagcctgcggaagttctggtcctccagggaggcgatggccaggtggcgcagccgcagggcgcccaggctgcgcagatggcccagcgactccccggacagagccgtgaggttgcagcgctccagggtcagctcctccagggccagcagccccgcgaaggcgcggcgcgagacgaataccaggtcgttgtcgcccacttccagccggcgcaggctgtgcaggtcctggaaagtgtagtccagcaggattaccagcttgttctcgctcaggtccagcagcgtgaggttgtccaggcgcgtgaagaccccgggcgggatgagcttcagctggttgccacggagacgcaggacgcgcaggcgcggcaggttggcgaaggcgccgggctccacgtgcgcgatggcgttctcgctcaggtccagctcctccagcgcgggcagcgcggccaggtcgcccgggttcaggcagcggatgcggttgcggctgagctccagcaggcgggtctcggccgggatgccgtcgggcacggcggtcaggcggcggcgcgtgcaggccaccgcgcgggtctgcacggtgcactcgcagcgggccgggcagcctccagccgggggcggcgccgcgggcagcaggagcaggggcaggctcaggacgcacagccagcaggtcatggtgcggagcgtgggcctagggccgcgccaccatcctcctgcgcacctgcgggcgggcggggagcgggcagcgttagcaccgttagcacccctccgcggcgcctctgccgccagcccgcccctaacccgtcccagcacggcggctcgctcctgtaaacccagcattttgggaggctgagatggaagaattgcttgagttcaagagttcgagaccagcctgcacaacatagcaagactcccatctctacaaaaaaataaaagatgagccgcatgtggtggtgtaggcctgtggtcccagctactcaggaggctgaggcaggaggatggcttgggcccaggaggtggaggctgcagtgagatatgcttgtgccactgcactccagcctgggcaacacggtgagacccctgtctcttaaaaaaaaaaaaattaaaaattagctggttttcaagtaattgtgaaatattgaaaagtttacccaggcatggtggcctgcacctgtggtcccagctactcaggaggctgagccaggaggattgcttgagcccagggggttgaggccacagtgagctgtgatcgtgccactgcactccagcctgggagatagagcaaaaaaccctgtctcaaaaaaaaaaaaaaaaaaaaaaaaaagcagcattgatccaccgtgtggctgcaattccaatctcctgggtttttttgttttgttttgtttgtgtttgtttgtctgtttgagatggaggctcactctgtcatccaggctggagtgcagtggcttgatctcggctcactgaaacctccacctcccgggttcaagcaattctcctgcctcagcctcctgagtagctgggattacaggtgcccgccaccacgtccggctaatttttgtatttttagtagagacggggttttaccatattggccaggttggtctcaaactcctgacctcaggtgatccacctgcctccgcctcccaaagtgctgggattacaggtgtgagccaccgcgcccacccgctcctgggtgtctttgcataagagaatggaacacacagcgcacggaaaacctgggaacattcacagccgcatctgtaacagccaaacagtggaaaaggctggaatgtgccccaaggaatggatgggtcagcaccgtgcagccacccacacacgaacacgactcagccatgaaaaggagtgaggctctgacccaggccacggtggggatgcaccttgaggacgccatgctcagtgagagacgcgacacaaaaggccacactgtatgaccccgtttctttctttctttctttttgagacggagtcttgctctgtcacccaggctggagtgcggtggcacaatctcacctcactgcaagctctgcctcccgggttcacgccattctcctgcctcagcctcccgagtaactggggctacaggtgccagccaccacgcctggctaattttttgtgtttttagtagagacgggatttcaccgtgttagccaggatggtctcgatctcctgacctcgtgatccaccctccttggcctcccaaagtgctgggattacaggagtgagccaccgcgcctggcctttttttttttttggagacagagtctcactctggcccaggctggaatgcagtggtgcgatctcagctcactgcaagctccccctccccagggtttaagtgattctcctgcctcagcctcctgagtagctgggactacaggcacccgccaccatgcccagctaatttttgtagttttagtacagatggggttttgccatgttggccaggctggtcttgaactcctgacctcgggtaatccaccggccttggcctcccaaagtgctgggattacaggtgtgagccaccgcgcccgtccgtgtgatctcatttctatgaaatgtccaggacaggcccatccacagacagggagatgacatttgatctcagaccctgttgtaggtggaactgtgttcccgcaaatgttcaaggccgggcgcggtggctcacgcctgtaaatccagcattttgggaggccgaggtgggtggatcacctgaggtcaggagttcgagaccagcctgggcaacatggggaacccccgtctcaactaaaaatacaaaagttagcctggcgtggtggcgcgcatctatagtcctaactaggggaatctggggtgggaggatcgcttgatcccaggagttgaggcttcagtgagctgtgatcgtgccactgcgctctagccactgggcaacagagtgagactgtctcaagggaaaaaaaaaggtatgttcacgtcctgccctccgtgcctgctgtgcacgggacctcatttggaatcagggtctttacagatgtgctcagggctagatgagactgcagtggattacagtgagccttttccaacgactcctgtccttacaacaagagggagacttggacacacacctagccctatacaggggaaatagagccgtgtgaacacggaggcagaggctagggtgacacagccacaagccggggattgctgagagccccaggaagccgggagaggcaggaaggacgcgccccgggagcttccagagggcccccggccctgcggacaccttgattttggacttccgcctccggagctgggaaggcatatatttcggttgttttaaaccccccggggtttgtggcgccgtgttctggcaggaaacaggccgacccaaaagttgaacagagcccatggttttctggaggaagggtgtgtgggctgggggaacagccacggcagaggccccgaggtgtggcgggagtctggtgaagctaaaggagagagtggaggggggcggggagctgggttaggaggggcctctgggtggggggcagatgacatggagccgtggtggcccagaggaacaggcgccaatgctccgtgggtcctggtagctgtgcctcctgggctgtttccgtctctcctgggagcctgctgcacccttaccagctcttcttggctgcagccaagattctgggggctggggtggcgggtggaggtggggttggagggagcgggaggaagcagccagaactaccaggcggcattgcccagcttcttctgcttggccgcctcccccgccagccggccggctatttttggcatcttggcagctgagcccccctcggcatccccccaggccccgtggcccaaaccaggttgtgcgtctcctcacggttcccactggccttcgatcctcatttgctaaatatctgcgaaggcagctcccgcctccccagtgcctacgcgaatttaatcccagagcgaacagacgcggagccccgggagactgcttcatgtcagagatgaattgtacgtaagtgaggacagggtttgtatcttgcagctgtaattcattaagatgaggtcacgcaggagcagggagagccctaattcaatgactggcatccttataagagggaaatctggacacagagacacaggcaacggccaagtcacaacacaggcagagactggagtgattcatccacaagtcaagtgacaccagggatggccagctaccaccggaagctggaagagtcagaaagggtctccccaaaagcccccaaaggaagctggacctgcttgagcttcgacttccagactccagaactgtgagagcagcagctcctcttgcccggcgcggtggctcacgcctgtcatcccagcacttcgggaggctgaggcgggtggatcacttgaggtcaggagttcgagagcagcctaagcaacatggagaaaccctgtctctactaaaaaatacaaaaactagccgggcgtggtgatgggcgcctgtaatcccagctccttgtgaggctgagggaggagaatcgcttgaacctggcaggcggaggtggcagtgagccgagattgtgccactgcactccagcctgggcgacaagaggggaaactccgtctcaataaatacataaataaataaggtgaaacgccaaactgaattctggatttaggtggacaggacacatatgtacagatgccaaaactgggcattcacatgccacgtggaacagcacagagtgtggtggaaaggaaggtgtcgcaggtgagaatgtggtcccaccgagagaaaagcgaggggcccctggttcccaggaggccttggtcctcctgcccccagcttgggaacataggaaactcgagggagggaggaagggagggagcgagagagggggcatgccccccccaaccccggaatcatccttaatcccaacctgggcatgttacagggaaggcaatccttccctcccagcaagctccctcccagcactgtttttctgggtcattctctcccgagctgctgccctgccgacagcacactcaggggctgtgtcacgggaggggacaagagtgctagggcggtgatggcacttttatctgccccccgaccctgcacctccccccttactgtccgctccacagtgtttacaaaaccactggtgaaaacctgcccacagcccaggtgtggcggctcacacctgtaatcccagcccacaggccgggcgcggtggttcacgcctgtcatcccagaactttgggaggccaaggcggggggatcactggagcccaggaggtccaggatgcagtgagctgagatcgcgccgctgcactctagcttgggcaacagagcgagactctgtcttttggttcttttttttttgagttagggtctcactctgtcgcctgggctggaatgcaatggcatgatctcagctcactgcaacctccacctcctgggttcaggtgattatcctgcctcagcctcccaagtagctggggttacaggtgcccactaccacacccggctaatttttgtatttttagtagagacggggtttcaccatgtgggccaggttggtttcgaactccacttcaaatgatccacccacctcggcctctcaaagtgctgggattacaggtgtgagccaccgtgcccagctgcaagaccctgtttttaaaaaagaagaataggccgggcatggtggctcacacctgtaatcccagcactttgggaggccgaggcgggcagatcacaaggtcaggagatcgagaccatcctggctaacatggtgaaaccccgtctctactaaaaaaacatacaaaaaattagccgggcgtggtggcgggcgcccgtagtcccagctactcgggaggctgaggcaggagaatggcgtgaacccgggaggcggagcttgcagtgagctgagatcacgccactgcactccaacctgggcgacagagcgagactccgtctcaaaaaaaaataaaaaagaagaagaataaagtaaacctacccacagctctcaggcgagaaacatccatctgttggcctgcaagaccctacagcaagcagccctcacccccaccctagactcatccagatactgcaaaagctctttcctctcagtgcagacccctcaccctgctctgctcccccaggacccgggcatgcaccctccctcccccccttttttttttttttttctgagacagagtctcgctctgtcgcccaggctggagtgcagtggcatgatctctgttcactgcaacctccgcctcccaggttcacgccattctcctgcttcagcctcccgaggagctgggactacaggtgcccgccaccacgcccggctaatttttgtatttttagtagagacgggatttcaccacgttggccaggatggtctcgatctcctgacctcgtgatccacctgcctcagcttcccaaagtgctgggattacaggcataagccaccgcacccggcctttttttttttttttttttgaaatggagcttcattctttttgtccaggctggagtgcaatggcacgatctcaacttactgcaacctctgcctcccgagtttaagtgattctcctgtctcagcctaccaagtagctgggattacaggcatacgccaccacgcccagctaatttttgtatttttagtagcgatggggtttcaccatgttagccaggctggtctcaaactcctaacctcaagtgatccacccgcctcggcctcccaaagtgctggaattacagtgtgagccaccgcgcctggcctgtttgttttttgagacaaggtcttgctctgtcgcccagtctggaatggcaggatctcctgggaggcctttgccttccagcttcaagcgattctcctgcctcagcctcctgagtagctgggactacaggcgcccgccaccacatccagcttatttttgtatttttagtagagatggggtttcatcatgttagccaggctggtctcaaactcctgggctcaagtgatctgcctgcctcagcctcctaaagtgctgagattataggtgtgagccactgggcctggtccattttctaaattagaggtttctttttaagttggaatttatttatttatttatttatttagagacaggttcttgctctgttgcccaggttggagtgcagtggtgtgatctcggctcactgcagcctccacctccccagctcaagcgatcctcccacctcagcctctcaagtagctgggattataggcaagtgccagcacacctggttaattttttcatttttttgtagagatagggtctcactctattgcccaggctggtctcgaactcctgggctgaagtgatccacctgccttggcctccgaaggtgccgggaacacaggcatgagccaccgtgctgggccaataattttttttttttttttttttttgacatagagtcttgctctgtcatccaggctggagtgcagtggtgtgatctcagctcactgcaacctctgcctcctgggttcaagagattctgctgtctcagcctcccgagtagctgggattacaagcacgcaccaccaggtctggctaatttttgtatttttagtagagatgggatttcaccatgttggtcaggctggtctcgaactcctgacctcgtgatccgcccacctcggcctctcaaagtgctgggattacaggcgtgagccaccgcacccggcccaagaaattttttttaaagcagttcccatagagcacagataagggcaaaatcaggaagtttcctggagagatgacaggtctggaatcgctaggtcacagtcacactgatccagtggcagaagtgcctgcgggaggcctcaattcggatgcgctgtgtgacctctgttgagaaacctaccctctctggacctcgcctgtcacggtataggtacaagagccctccggggcaccctccaagctctggctctataattactcctgggatgagaggacagctgatccctcgcgcccagcaggggccactcaagctgtgacctagttttacaaccctgactcccccactcgacggcctggccctgtcatttcctctgcagggtgctgccggggaggcaggaggggggatctggcagctggactcaggcttctgacatgtcccctaagggtctggtgttccccaacttgggaggaagaactggttcctggagaggggacatgggagactcgattctgtgtacacggcctgcatctgctcaccatgtgccctgaatgcatccggttgtcctccctggtctcttattttttattttattttattttttttttgagatggagtctcgctctgtcgcccaggctggagtgcagtggtgcgatctcggctcactgcaagctccacctcccatgttcaagcaattctcctgcctcagcctgccgagtagctgggactgcaggcgcccaccactatgcccggctaatttttttgtatttttagtagagacggggtttcactgtgttagccaggatggtctcgatctcctgacctggtgatccgcccgcctctgcctcccaaagtgctgggattacaggcgtgagccactgtgccctgccttttttttttttttttttgagacggagtcttgctgtgacgcccaggctggagtgcagtggtgcgatctcggctcactgcaagcttcgccccctgggttcatgccattctcctgcctcagcctaccaagtagctgggactacaggcgcccgccaccacgcccggctaattttttgtatttttagcagagatggggtttcaccgtgttagccaggatggtcttactctcctgatctcgtgatccaccggcctcggcctcccaaagtgctgggattaccggggtgaaccacatgcctggcctcttttttttttttttttttttttattgagtcggagtctcactctgtcacccaggctgagagtgcaatggcgcgatctctgctcaccgcagccttcgcctcccgggttcaagggagtctcctgcctcagcctcctgagtagctgggattaaaggtgcatgccaccacacctggctcatttttgtagttttagtagagacggggtttcaccttgttggccaggctggtctcgaactcctgacctcaggtgatccacctgcctcagcctcccaaggtgctaggatgacaggtatgagccactgcgcccggccccaggctgattctttaggggcctctgtcccctcccttgtcctcatgctgtggtcctgggggaaggcgacactttcagggctctctatctccatcctcatcggtccctcggaccacccccctcccaggaagctgccacccacctggggcattacctcccatcctcccaggatgggaacaccatctgctcacagatacctcctgatggtgtgtcccagccacctgaactgcagcccagggacccagccccatccctgacctctcccagggcgacccacagaaccccagcgtaaccccggccacgcggagccaaccccagctccacccttcctctcccacaggccagagtcctccctcgctctgggcctcccgccactgccaggcctccgtcccccaccccgaactcccctccttccagccgggctccagttcgcccccaacattcaacgcgctcctcctgttctggcattggtgtccccagctgccaaatggaactggagtagggggaggatcaggccagcccctgcaaaccgcggtctccccaggctctgtgaacactggggcctggtcgttctctggggtggggccgtcctgggcactgcagggtgctgagaagcgtccctggcctccacccactccatgccagggacaccacagatgtccccagactttaccaaatgtcccctgggagcagaatcaccctggttcagaccctctgggttaggggattccacagacccccaagagactctgcatcccacaatcctcagccctgctgaggtcccaggaggctgtgcacgttgaaatccacgccctgagtgggagggagagaggaggtgaatcccaggagctggggacccctggtttacaccgtctgccgggtcaggagttgatcctggtgtctggtgtgagcaggggacagatttagtgtttttttttttaatttaaataattaatgcaggtctctctttcttggccccatggacatcttatgtggatgactctctgtcttgggcactgccgggtgctgagaagcgtccctggcctctacccactccaagccaggagcacccccttcccagtcgtgacaggcacaaatgtccctggacacggcccagagtccccggcggggcagaacctccctgagtgggtccttgctgtagaggacgctggcacacagtgcgcctccagttcatgccccaggaggagccagggtgattcagcctgttttacacggggaggcggagacccagagacggacggcgacgtgctcagggccacacagcagagaggaagcaggtacaagacgcgaccccggggctgggtgcggtggctcacgcgtcatcccagcactttgggaggccgaggagggcggatcacaagttcaagagatggagaccatcctggttaacatggtgaaaccccgtctctactaaaaaatacaaaaaattagccgggcatggtggcgggcacctgtagtcccagctacttgggaggctgaggcaggagaatggcgtgaacccggaaggtggaggttgcagtgagctgagatcgcgccactgcactccagcctgggcgacagagcgagactccatctcaaaaaaaaaaaaaaaaaaaagaggaaaagaaaagaaaatgtaccagttgcccttcgatgaactggaaacacaacagagaacagaggccagaaagtccctgttcttttatttttatttatttatttgtgggtagtttttttttttttttttttttgagacagtctcactctgtcatccaggctggagtgcaatggttcaatctaggctcactgcaacctctgcctcccgggttaaagcgattctcctgcctcagtctcctgagtagctgggattacagacatgcgccactacgcccagctaatttttggatttttagtagagacagggttttgccatgtgcccaggatggtctcgaactcctgacctcaggtgatcagcccgccccagcctcccaaagtgctgggatgacaggccctgagccacaatgcccggccccctgtccttaaggagcttacattctggtgcgggtgacaccgtgaaatcagtgtacgggacatcagctggtaataaacgtcacggaggtcagaacagctgtgtcctcgggtgacgtcacctcctcggctctgcgccccgccgtccacaggcgcgaagccggagctggggttggcgaccgagaaccttcctgcctcccctccccagcaaggggcacgtcccaccaggcccggactgcccgtctgcccctgcagggcccctcgctctggtggcgggctcggtgagctctgctgcccggtctcgggagtctgggggagcgcggcgtcgacccctgtggagggaggactcgtgtttcaaggacagagcctcattaccatgcacgaccagccgcagctgaggccgcagaggcctttggcaggggggccgggccggcggcagggacggcgttggcggtggtggacgggagtgggggtctgtcctgaacaggtgggggtggtccctgtgctggcccccgccatgcgatcgcaccccaggactctcctcctcttcctaagccccagcatgtgcctggtgccgcgcgggtgctggaggcacagcggcttccacgcagacgcccgcagcaccacagcctgtgcacggcgcatccacgccctgttacaaatgttccattcaacgccttctagcacattcacagatcgtccgcccgcacctctagttccagaacattccatcacccccaaaaggaagccccgtccccttcagcagtcactcccagcccctccccagcccggacccccacccatctgcttcctgtctctgcgaattggcccgtctggacatctcgcatcaatgcaatcggactggctgtggcccccagggactggcgtctttcccccagcgtcaaggtgggggcacaaacaggtgagaatcgtgcagcccagctaatgagcagattgtctgaaaaaagcgctgaggagcggagctagcagggagctgtgggggggggggtctgttccgggctgtggctgtgtttgacgggcccagggaagaccctgtctgagctgagacctggatggggagccggggtcagcagggtacagctaagcgaggggcgaggctggccgggggtgtgtctgcgcttgcgggggtgggagccctagctggcaacggcaaaaccacacggggcactgaacccccagggaggtgtccggacttgcatccacaggcaatggggagccatgggaggatatggagcaagagcatggcgagatctgggttgcagttggaaggcgcgtccagctctgcgtggtccgaccccaggtcgccctgcctcacccaaacctggaaagtcttgactctcggctgcacctccatctccagagagcagggcactattatctccctctccacccggttacccacacgcagagctgtggccaatgatggagcatggggaggctgaactggacaccaggtgctgaatcaatggccccttgtccactccagagccaggacaagaactcacgggtcctcacctgaatcggccactgactgccttgggcagagacatcgaagtctctgagcctcagtttcctcttctgcaaaagggaactgcagggttcccagtcacttccctgggctgagcgagtgagaagtcaggcaaggaggttccttccggggaagtctccattgggtgccggctggggtcaggagcccagagtcctaggccctggtttgctcctggccatgtgttcacctcattcattcattcaacaaacattcattcaacaagcattcattcattcattcaacaagcacttaaaaacaatgcctgtgtgccaggcactggttttaagagaaacagcagtgaacaaaacagacaaatccctgctttctgtctatgggcaagaaacagaagaaacaagtaaagccgactgtcacatggcaggccatggtatgggaaaaaataaacagggaaggggggcctggggttggcagaatggggttggcagaatgaaggcctccccacagccagccggttctaatccccggaactgcagataaggccacccttacatggaaaaagggcctctgcagatgggattaagtaagaattgtgagatcaggagatcattccggatcatccagaggcccaacatctcacagggtcctcacgagaggaggcgggagggtgaaagtcagagactggaagaggctgtgctgaggctatgaagggatagggtggggccctgagccaagggatgcgggtgcctctgggcaatgggaaagatgggaaccggattttcacctggaatgcgcagcaggagggcccagccttggccatgtcctgctttttttttttttttttttttttttgagacagagtctcgctctgtcacccaggctggtgcgatcttggctcactgcaacctctgcctcccaggttcaagtgattctcctgtctcagcctcctgagaagctggaactacaggcatgagccaccacgtccggctaattttttgtattttcagtagagatggggtttcaccatgttggccaggctggtctcgaactcctgatctccagtgatctgcctgcctcggccttccaaaatgctcagactacaagcgtgagccaccacacccagcctcatgccctggttttacgccagtgaggcccattttggactctggcctccagaacggtgcaataataaatgtgtgtggttcccagccactgctgtcacagcagccagaactcatcagggtcattgcagtcttgaagagggaggtcgctcgaggcctcccggatctgtgcacctgccttctggggcgtggaaggcaggggacattgacctctccttggggtctgagatctgcaccaaccacggtgcaggcaccggccttgaggaccccctccccaaaactgtcccccacagcaggacctgggcaatggaggcctctcttccctgtacccccagctgtccttagatatggatcctggattaatggtcctggaagctcttagctcaaggagaaggcagagtgtggctgtgagtggccggggtccctccctagaacagaggtggccctaccctcttggtgcctggtggtgtgggcagctccttccctcagctcctggctaagcccccggcccttccaatccgcctcctctattctgagcagggctcttcccctccctcttgcaaggttacctcaaacacatccccctccagtccccgcccagggcaagggatgctgacatctcccttgggaaaggccctcctagaggccggccaaacccagagggggcaggagtgagaagtgtggtagcggtcccctctgtttccaggcccacagtgacctccatctccctccctctgccccccaccacaaccagggcggtgggagtaaggggagtgtgctctggatgccccgtttgagcttctaagacggatatgggaggagggggcccagcccctcacagcacgtggccctccaaggtctgcttttggggacacgctgccagtcccccaggacccctgcatcctctgccctagatccaggccctcccggggcttcatccatgacaattcattaagccctaattagcttccatctgctgttagtccccgtcaacccctcgaggggctgggggcctcccgacccactttccttcccagcctgtacacggggggccgtggactgccctctgcaggcagggcctctggatctggaaccagttttggagcacccactgtctacaccggccacttcacccactagcccagccctgactagggggaataataaagttcgttttggagagaaggagactgagggtcagagtgggccccagctcactgcacaacttagctgcagacagtcagcatttgaacctggatctgacgccagctcctacccacaaaatcccagctccccactagagggtgaagggcgctctttggaggcccgagattgacatgtggtggtgggcggcttgatggggcccacccggggccaactttgctcgcagagttcttcaagaggctctacctggtgacgaggtagtgactcagggggcgccggggaatgacagtgctgtgggaagagacatcaaactgccttctattcccactcagcaaggcaccttcaggtcccggcttaccctgggggtggacggctgaggctgagggaggccaggcagggctgctgccgtaaccatcgtgacctgagcatctgttttatggtggcaccacactgcagccgaggtgggcagcatctcatttaatcccatgtggggtggatctgagagaggggacgtcatttgccggaagtcaccggtgaagaccagacaggcagggcagggaaggctgagttgaaccctcctaagcccccatcccaccgcccggctgcccccttcctgccaccccacatcatcgagatggggacaggagctgggtctacaggggaagcccgtgggttcttcccactcagatcctgtctccgacgatggctgctgcttcggctcagagaacagccagggtaaggccatgccgcggcagcccaccccacaccagcctcctgataaagccagcaccaccctccctgaacctgtttccagcctgcgtcctccacctgaccactcacacctcacaccttctgcatcctctccaggccacttccagggagccctcctgggttgctctggttctcacagctctgttgtccctgaaggctccccccagccaagccccagatcgtccctctgcaaataccactgcacagcagacgcccgctccccacccccgccggagcaagggtgtctgcagcctcgctgcgtccatggtttagccagggaccgcttgctaaaatgcagcttctggggcacatcgcctcagaagttctgactcctcagaactgggggggccgggacaccggcaccgttagcgccccaagcacacgttgagaaacccagttacatggtggtctccagcgtaaggacccggggcttttcttgtgcccggaccaaggcacgaggtgctgctcccctaaacttgttgaatgggactcagggcctcccctggccaggccccagaggcccgggaggtggcggcacccactcagggtgcccaggcccaccatttctggtgctattcagacgcccccagagcagggggactcagccctatgcccccaggtccctccccgccaggccgggccgtcagctccagcgatggagcaggctccggtgtggaccccagataccctttgcgtcttccagctccgcacccccaggctggaccagacccggctcgggggagacagggcaggaaggcgcgggctgcaggctctattcggacgttccccacaccccagacccaaccagtgcccccttcatctcctcctggagaggagcgcatcctcccagcgtccccagtgccccggggagatgcccacccgattccccgctccttggcgccccagaggaggggcggggggccccagggtggggagttcgcccccaaagtttccagggggagcgtcgggggcctggcaaggagcgatgagcccgggaggggtgcgcggggcaatttcccccggctgaggatggggtcgcgggttgggggctttgggcggcagggtcgcagggtgcaggtgaggggtccccaggtctgcgggcgcgccccacgccgggccccggcacggccactcacctgggcggctccgccgcggacacggcgcgggctgcggcgcgggggccgcccggagccgacacgagcagccgccgccgccgccgccgccgccgccgccgcctcccgggctccgccgtgcgcgccgccgccgcgcgcaaccgcccgccggtctcctcggcgcgcctggcgggggcgcgcgggggctgcgctgggccgcgtgcgcggcggctggggccgcaggtgtgagaggccacgtgggcgcaggtgcggggacactgggagcgcgggtgcagaacccctccgtgcgcatcccgggcgcttcgtgtccgaggacctcctgtccccacggcctgggtgagcctgcggagacggccgtgccgtgcaataaacgcaggggcaccccaagtgcagcaggttgttccgtgtggaaccttctggaagctaccatcgcctcctctgccccccgtcccccacccctagtccaggccgccaccatctgcacctggacatctgccacagcccagcccaggcccattccttatgtggccctcagaggaagcccctcagaggaagcttagccactgggctccagaacctgccgtgattccctattgccgtgagggtcccgtctgcaccccacctaccctggaatttctctttctttcgttctttctttctttctttctttctttttttttttgagatggagtcttgctctgttgcccaggctggagtacagcggtgccatcttggctcactgcaacctccgcctcctgggttcaagcgattctcctgcctcagcctcccaagtagctgggattacaggcacccgccaccacgcccggctaatttttgtatttttattagagacggattttcagcatgttggccaggctggtctcaaacccctgacctcgggtgatccacccacctcggcctcccaaagtgctgggatgacaggtgtgagccaccgcccggctgcctgcactgtttggtctgccgcaccacctccttccccctggcctgtcctcactcactctttcccgggctccaccccctcagccttcctcaaacaggccaagtccctccagtcccaggcctttgatcttcgctgtgcccagcttggacagcctttctctctgtccctccatcgagcagcttggagcctctcagtttgtctaatgggcttgttccccaatgtgccttccgcctagcacacagcagcgcacacaccaagtgcactgcgagtgctcatggaaagttttttacctttttttttgtcttttttttttttttttttttttgaaatggagttttgctctcgtcacccattctggagtgcagtggtgcaatcttggctcactgcaacttccacctcccgggttcaggcgattctcctgtctcagtctcccaagtagctgggattacaggcgcccatgaccatgcctggctaatttttgtatttttaggggagatagagtttcaccatgttggccaggctggtctcgaactcctgacctcaggtgatccacccgcctcggcctcccaaagtgctgggatgacagacgtgagctactatgcccggcccctcactgcatcttctaaaagccacatttagcctccctgtctcacagatgagcaaaccaaggctgggagatgccatttgtcccaagtgaggggtgagaaggaggcctcgggaacctgtgtgtgtaaccttgccctgtctgcccccttcacccactctgcagtcctccccaccagctgtgtattcccagtggctttggcggtggcctggcactcacgcagccacctgtgactcaagcaggctctgttcccagactgtcgcgttggctggaggcccagaaaccgcatccctgggaggctgcaggccaggccccccacaggatgctgtggggggcgggtatggttcaattcctggccccagagaggtccagaaggacttcatgacaccccatgctctccccaccaaatggccctgggctgctgtgctgtgtgaccccagtaggggaggtctccttctctctctgaacgtgtttctttctctgtaaagtgatgctcctgatagctggctctcagggctcttggaggaaggtgttcattgagcacctactgtataccaggccaagggctggagggaggaggaggagacgcttccagcctcaagggggatttcttcggacagagggagcagatgcctgaaatatgaaatcgtcacaaagcggcgtggaagaggcagtagtgacaccgggtcccggaccgaagccaggggccagggaggcttcccggaggaggagacacttgctatgagtcctggagggtgagggatgccagctggggtccagtcgaggccctgcctgtgtaaccgtgggggatgtccctctagcctcggtctccacctctgcaaaatggagatcggaacagttcccatcttctcccggggctgcagagactctgcagtggttctgcccggtttgtggccagtgctcccgagcccttgggggtggagattgggccaggctcctactgcagggcctgagcacgggctgctccctctgcctagaacgcccttcccccagacctctgcccgcccctttccccctcttcactcgcgtctccaccccgaccttccatctctccctgcgtggcacatgcctgctaagatgtccagtaatttgctgatgggtccagtgcaagctctaccctctcttcttttttttttttttttttgagatggagtctcaccctgtcggttgcccaggctggagtgcagtggcgcgatctcggctcactgcaagccccaccgcccgggttcacgccattctcctgactcagcctcccgagtagctgggaccacaggcacccgccaccaggcccggctaatttttttttgtatttttagtagagacagggtttcaccatgttagccaggatggtgtcaatctcctgacctcatgatcggcccgcctcagcctcccaaagtgctgggattacaggcgtgagccaccgagcccggccccagccttttttaagacagggtttcgctctgtcacccaggctggagtgcagtggcgcagtcatagctcactgcagccttgaaccccctgggctcaagtgatcctcctaccccagcctcccgagaagctgggactgcaagtgagtggcaacacacctggctaatttttttattttttgtagagatggggtctcactaagttgcccaggctggtcttgaactcctggcctaatgtgatcttctcttcttggcctccccaagtgctagtattacgggtgtgagccactgtgcccagcccagtcttgtaatattatgtgtccatttactcctccccaaaatgatgagggattagtttttattattattttttaagagacagggtctcattctgtcacccaggctggagtgcagtggtgtgatcatggctcactgcagcctggaactcctgggctgaagtggtcctcctgcctcagcctcccaagtagctgggactacaggcatgtgccaccacacctggcttttttaaattagctttttttatatcttgtgagacagagtttcactctgtttgcccaggctggagtgcagcggtgcaaatcttggctcactgcaacctccacctcctgggttcaagcaattctcctgcctcagcctcccgagtagctgagactacaggcgcatgccaccaggctcattaaatttttgtatttttagtagagatggggtttctccatgttggccaggctggactagaactcctgacctcaagtgatccgctcacctcggccccccaatgtgctgggattacaggcatgagccactgagcctgggtcagattaactttttttttttttttttttttttgagacggagtctcactctatcgcccaggctggagtgcagtggcgcgatctcagctcactgcaagctccgcctcccgggttcacgccattctcctgcctcagccttccaagtagctgggaccacaggcgcctgccaccacgcccagctaatttttttgtatttttagtagagacggggtttcgccatgttagccaggatggtctcaatctcctgacctcgtgatctgcccgccttggcttcccaaagtgctgggatcaccggcgtgagccacggtgcccggcccccagattaacttttaattaacagggtcttgctattttgcccaggctggagtgcagtggtgcaatcatagctcactgcagtcctgaactggcctcaagtgatcctcccatctcagcctcccaaagtgctgggattacatgtgtgagccactgtgcctggcctggattcattattattcccactttacagatgagaatttggggactcagagaggttaggtcactagcctcaggtcacacagcatctgcctgctgaagctggggcttgacctcaggcatctggagcccaaggcttccaggactctacacgtttgcctcttagcagccaaggactctttccccagttacagagggtggccacttgtctggggccacacgggaggctcccaggccacctgcccccgcagcctccctccctgggacatgactgccactcccgcccgcatctggtcccgtccctcacgctggagagagcgagcgagaggaggagggcttttaattttagaaatggttcctgctgcagaagagttcctgctggttttcccaggcaggagagcacaggacaggagacccctcggccccaccacggccgtccccagaaggatgcccccctctgcgggctgctgcctccctgccccccagcctctcccacggcttccccatctggagccgccctctccgcccaggtggtaagtctccatggcaacgtcccatcacaggtggtcgtaaccttagcaaccaggtgctcccaccccaccgcctgggaggctcaaagccgcgcctgcatccccctcccacgctctccctgcccccgccccccgggcagctctccaagaggaaccgagggagatgcatcctgccagggatgctgggcccagagacttgagggacaccccaagatcacccagcagctgagctgctgggcctggggtgctccacgggacatcaaacccacctccctcgtcctgcaggatgcaaaagaaactgcacttctcgacatcgcctgggctcctactaggtgctgcgtccatgccaggctcaggcgccgtccctgccctcaggaggcttccactcaggacaaggggtggggagacactgaccgaggacaggaaggggacaatggccgggcgtagtggctcgtgcctggaatcccagcactttgggagggagaggcaggaggatcgcttgagctcaggagtctgggcaacatagcgagaccctcatctctttaaaaaaaaaattatctggacatggtgttgcatgcctgtagccccagctactcaggaggctgaggtgggaggatcgcttgaggctaggaggaggagattgcagtgagccaggatctcaccactgcattccattctgggcgactgagcaagaccctgtctcaaaaaatatatatgcatattggccaagtgcgctggctcacaccagtaatcccagcactttgggaggccaaggcaggtggatcggttgacgtcaagagtttgagaccagcttggccaacacgatgaaaatacaaaaattagctgtccccacaaataagtgacccccagagtaagttctaggtttagaatgaaatttatccatctactattaaaaaaaaattctctcagccaggcgcagtggccgagaaaaaaaaaaaacacaactctcctctgatttacatggaaattaatcacccacatcagattctgaaggaaactcttgcttatattacttttttttttttttgaggcagagtctcactctgtcgcccaggctggagtgcagtggcgcgatctcggctcattgcaacccccgcctcctgggttcaagcaattctcctgcctcagcctcctgagtagctaggattacaggtgtgcaccaacacgcccagctaatttttgtatttttagtagagacggggtttcaccatgttggccaggatggtatcgaactcctgacgtcgtgatctaccctcctcagccttccaaagtgctgagattacaggcgtgagccacagcgcctggcttaaccttttattatggaaaattttatacacaaacaaaggcttagagaatcacgtaatgaacccccataaagccatccccaaagtgtgatgcatctggttccataagtccctctccaccctccccaacagactatatcaaagcaaatcccagacacgaagtaatttcatccataaatatttgcatttctaaaatacaatgacttaaaaaacacagccaacaattccattatcattttttaagaaaatggacagtaattccttaatatgctcaaatatccaggcagtgtccagtttccctgactgccttctaaaattttttcacactttgttcagctcagaatccaaataaggtccatttactgcaattggttgatatgcctgtctctttctctctctctctctctctctctcttttttttttccagagacagggtctcgctttgtcacccaggctggaatgcagtggtgcagtcatagctcactgtagccttcaactcccaggctcaggtgacccccacccccgtctcagcctcctgagtagccaggaccacaggtgcatgccagcatgcccattaattttttctttttttggtagaaacagggtcttgccatgttgccccggctggttttgaactcctgggtttaagtgatcctcctgcctcagcttcccaaagtgctgggattacaggcatgagctgctgaaccactgtgcctggccttagttcttcctttctgctgtttgtcttatatgtcattttcctgtcttattgcaccgtgtggcacctccagtacaatgttgaaaagaaccagtggaactggacatctttcttttgtttctggccttagggggagagcacccagtccttcgccattgaggatgacagctgtagggtttttatagacatcttttatctggttgaggatatgccattctattcctagttgcgtgtttttaatctgcatgaatgctgaattttgtccaagtgagtgctgaattttctgcatctactgagatgatcatatggttttcctctcttatgctaatgtggttaatcacattgattcttgggtattaaaccaaccttgcattcctgggataaaccccacttggtggtcatgatggagaatcccttttatagacagctggattcaatttgttaatattaaggatttgtgcatcgatattcatgagggatattggcctttgattttcagtaatgtgttttggttacgctggcctcataaaacacattgggaagtgttccttcctcctctagtttctgaaagagtttgggtaggattggtgctgtttgttccttaaaagcttcaggatcaattctgttgttttccagagaagggggtctctctatgttgcccaggctggccttgaactcttgggctcaagccatcctcctgcctcggcctcccaaagcactgggatttcaggcgtgagccaccgtgcctggcctgggaacaattctgaaggtagaattgtcagcatttgctgatggctgggatgtgggaggcaagagaaacagcagggaagggcacccgagggtgtaagcctgaatcatggagctgtttccttggatgcagaaagctggagcggcacctggtggaaggagcattggtttggggtgtgcattaattttggggcgcctctggtgctggggcagagatgaggtcagggaaatggaagtcagaagcattttcaacaatgaaagcggaacccacgggcatctctgtctctgacttcgtgcccattacccccagcttcctgttcccttactgcttctggtctgtgttcactggccggcgtgcagaactctgtcttctgtcgggcactggaaccctagcggcctcgggcccgtcattcctgggtgaatcctgacccctgctggctctggtcagcacggtcgaggccagcgtggccacgcagtggcggtggggggcgggggtccacggagctgagtcctgaagggaggtagagagtgtgagacactggaggcagaagggcccggagttcatagacagacctaggcctgcccggaaagcccctgtctaatgggcaaggcggaggagcccggacttattcctgtggacaatgggggctttggggaggcgcagagtgggagggacctggtgagatcccaggagcttgagccctagccgtggagctgggacccccaggactgtcctttttattttaagacagggtctcgctctgtcacccaagctgcagtgaggtggcggaatcatagatcactgcagccttggcctcctaggctcaagagatcctcccacctcctcctccctaagtgctgggattacaagtgtgagccacagtgcctggccccaggggtgtgctaacctctctcaccctgggcggtccccaggctcaaaccaacaattcctgaaccctaggagctctcctcgtgggcacagcttcttctgtttacaaaccttcttcccttcatatccatgtccttgtctgggtccaggcaggaaatcgacacccagaaacaggcggtgatgggcagcaggggcctctgtggcagaaggtctcacgctacacggtactgtccgggtccttgcacgggtgttctggaggtgcagggaggcctcccctcggtcgttcaaggcaggaatggatctgcggcgtgaggccgacggtgacttgctttctcccagctcctggggccacagtgcgttcattcccctcccctcccctccactcccctcccctcccttcccctctcctccactctcctttcctctcctttcctttccttctttttttgagatggagtctcactctgtcacccaggctggagtgcaatggcgtgatctcagctccttgcaacctccatctcctgggttcaagggattcttccgcctcagcctcctgagtagctgggattacaggcacccgctgccacgcccagctaatttttgtacttttagtagagatggggtttcgctatgttggccaggctgctctccaactccttacctcaagtgatccgcccgcctcggcctcccaaagtgttgggattacaggcgtgagccaccgcacccggtctcattcccttttctctttgcctcttttaggcactgggacttcatttctatgcccacaagatgcgggtggctgggagccccattggcttggggcagaggaaaggcacggtggggtagatggagcggcaggcagcctacctcctacgctaggattctggctgtgttaccctgtgcaagctgcttaacctctctgggcctcagctgcctcatctgtgaacgggaatgacaaaaggacccgcctgaggtcctcctttgggggagggttccgtgaaccagagctaccttggagaaggcagtggggtcagtgtctggggcagacgccccagactgactatcagtaacatccagctcccgtcctccttcggaacctgcagtggggtggtaccctgaggatctctggctggtctgggggcaagaagggcccatctgtcttatctaccagggcctccgccaatgtctcccagagtggggcctccgaggacaagactcgagggctctcggccagcacttgaccgcgggcacaggcagcaaagctggttcccgggccaacggccacggccccgacatcgtgatccgagggctgcgctgaccatgggcagggagttgaaagggtgaggtctgggccaggggcagggggcagcctgcagttggcacggcgggctggctggcgggacctgctggggctggggctttatacggggccaggagagtggaggcctgggggatccagtgtctcgggccgggccggccgccgtgtcctcatttctctctcggttccctctctacgtctccgcctctgtttctgcctctccctatctctctccaaatctctctgtgccttctggctgtaactgggtttttcttctctgactctttgtaaaatattaaattttcaatgtaatgtggaatgtaaaatattaaatttctccttttaaaatattaaaagcaggccaggtgcagtggtgcgcacctgtcatcccagcactttgggaagccaaggtgggaggatttcttgagcccaggaggtcaaggctgcagtgagctgtgctcacaccacagcactctggcctgggccacagagtgagaccttgtctcttaaaaataaatacatagataaaattaaaagtggctttgtagttggctggaggtcctggactcctccagcgtatcctctagtgatgggcagctgggttacttccagtcttttccgagcaggtcagagtggctctctggggtggaaatggttgagaggaacaggctcattctggtctattctctggggacttctgtctgcctccccaggaagttgacctctccctctcccggtctgcacagccttctgtttttgtctgtgggcctcatttcaaagcttcgtgccctgggctgggcatggtggctcatgcctgtaatcccagcactttgggaggctgaggcaggaggatcacctgaggtcaggagctcgagatcagcctggccaacatggtgaaaccccatttctactaaaaatacatagccaggcatggtggcgggcacctgtaatcccagctacttaggaggctgaggtgagagaatcacttgaacccaggaggcggaggttgcagtgagctgagatcgtgccactacactccagcctgggcaataaagtcagactccattgcaaaaaaaaaaaaaaaaaaaaaaaaagcttcgtgctctgaactctgtccccacatgactgtggccgagggcccagccacagagtggatactcaacacctttttcaacacttcagagagaaggaattggatttcagagaggttgggacaccttccctaagccacacagcatgtggtggggggagccttgggctcagggctttgtggctgcagagggctttgcaaagttcatcagctcactaggaggtgacggagtgggcagagagcagtctacagtgtggggggctgttctgaggggtgcagcggtgaggcaggccttgcttcctctgcgggagaaaccgtggggctggaaaacgggacttccttcctctcctgcctccctgccgttcctggaggttctaacgaggccagttagcctctaaggccttgacacgttctcccactgggggttgaggcctctgggccactgggaccctgggtttcagcctttgcatctggctcagacagggcaggcaggtgtgccgcgtggacagcgtgttggtttccaggccggtcagctctggtgtcagggttgtgtttctccatcacgtgacatcctgatcccccacctgtcaaatggacgcagggaactggtcccggacagcgaggcttgtaggcttgtgggttgaacgtcagcagtccgggcacacctgaactctgtctgtccttcgctggaggctgtgaccccgcagctatcccagcaaacccccgccatccccggtgcgaggctggaggctggggcttgggatgaggtctcggccggtggtggcagggctgggctaggtggccggggccggggagggatgaacagcggatgcaggggttggccacgaggtccgataactaattccccagccacaggggctagtgccgctgggccccagcaaagccagtgtctatggggcccagatacccctgccgagaagccagctggttccacttattcggaggcagccagggagcgtgagcccatccagacccgaggctgagctccgtcctgttctgctgctatagcttcctggcaacctggaccacacgctgcctcggtttcccgagctggggatgaaggggttagcggccaggatgaccctctcacgctcaggtcataagggacagcctatcctctctcaacccgagtgatgaatcagacaggccctgccctcctctgggaagacagtgcctgggggacagaggtgcaaccaggaaacggagtccaggaggattgcccggctgtcgggaagagacatttaggggtatgcaggatgggctggcccgctggagtgtgggaagtcctagtgcaggtgtgggaggccggtgccagggcctgtatctgcccagtcaggacacgtttttaacattttttgtaggccaggtgtggtggctcatgcctgtaatcccagcaattggggagggtgaggagggtgatcactcgaggtcaggagttcaaaaccagcctggccaacatggtgaaaccccatctctactaaaaatacaaaaattaggccgggcgcggtggctcacgcctgtaatcccagcacatggggaggttgaggcgggtggattaccttaggtcaggagttcgaaaccagcctggccaacatggcaaaacctcatctctactaatacagaaattagctgggcatggtggcgggtgcctgtaatcccagctacttgggaggctgaggcaggagaatcacttgaaccaggaaggcggagtttgcagtgagccgagatcacgccactgcactccagtctgagtgagagtgaggactgtctcaaaggaaaaaatatatatattttttgtagagacgaggtctccctattttcccaggctggtcttgaactccggggctcaaagagatcctcctacttcaccctcccaaagtgctgggattccaggcgagagccactgcacccgacctcaggacatgctgtgagcacggaaggaacccagaaggggctggctgtaggtgaccagtccatctcacaagcgggggcagcagcgggggcaggtgttagctgcatgggctgtggggtctggcctcttgatgcaccccggctcctgatgcaccccagcctcctgatgcaccccggctcctgattcaccccaggtcctgacacacccagctcctgacacacccagcctcctaatgcaccccagcctcctaatgcaccccggctcctgacgcaccccggcctcctgatgcaccccggcctcctgatataccccagcctcctgatgcatcccggctcctgatgcaccccagctcctgctgtcttgggggcgggcctggggttccacaagcccctcatcagactgaggttccaaactcgcctgtctcggccttggctgtgcccgccttggtcactcctgaaccctcacccccaggagggaccatggctggtatttgatgagctccagggactgagtccaatctccaggaatccaggtttcctcagaaggtcaagggaaaagcaagattcggggctcagacacattgaggtttgcaattttattaagaaaacaaaaattcaacctatacaaaaaggaaaatgcttccgttccaggaggcggtactgcggtgggagcagcagccaagtccgcgggaaaccgagctgctcgggcctgccctgcaccccccgcgcccccggccaggctaggcgtcctgctgctggatgaaggggttggggatggcctccatgccgtcctgcgggcagattagcaccacggacgtgccccggcacaccacgaggcccagctgccgggtgtcctccgtgagcttgtactggtcgtcagggtctggggaggagcagatagagaggactgagggacctccaggaagcctccgagaccccccacccacccaagaccctcgctccgacctccccacctgcaccctgcaggcgccacgagcacgcagggacctcagacgggatgcgctctgtggggcaggtccccggctcccacggctgagacccatggcccctagagaccagtggcagctccacagacagcagccacagccctccctcactccacaaaccatgggaacaagaaggcccaggtgatagccggctaccccgcgtctcagagctcactggggcccaggcaccagggccgggaaccaggttatcagatggccggccagaatacaggcaccctgggcctcctggtctctgcaaggtccctggagccctagggggccaatattcaccctataacaaagaggctgggggccgggcgcggtggctcacgcctgtaatcccagcactttgggaggccaaggcaggcggatcacgaggtcaggagatcgagaccatcctggctaacttggtgaaaccccgtctctactaaaaaatacaaaaaaattagccgggcgtggtggcaggcacttggagtcccagctactcgggaggctgaggcaggagaatggtgtgaacccaggaggcggagcttgcagtgagccgagatcgcgccactgcactccagcctgggtgacagagcgagattccatctcaaaaaataaaaaaataaagaggctgttcatgtggggtggggaccatgtgggctggcaccccagggaagtgccagcaagcccaagacaagctctcaagaggctgaaggcgattaaaactcctcactactgtggtcctgcagtggtgggggcatgggagaaccatggggcccaggtttttaaactttttttcagacaccaggtcttgctctgttgctcaggttggagtgcagcagtgcaatcacagctcacagcctcaacctcctgggctcaaacaatcctcctgccttagcctcctgagtagctggggccacaggcacatgtaccgccatgcctggctaattacattttttttttttttgtagagacagggtctcactatgttgcccaggctggtctcaaattcctgggctcgagtgatcctcctgtcttggcctcccaaagtgctgggattacaggcatgagccaccatggccagctacaagaataaatcttgtctcagtatcaatggatccaaggggcaagaccctctctctcctaagtcctgacattcccccagtgcccgggccgggatggggacttgccagctggggacttgccgcaggagcttctgggggagagtctgaggacttggcggcctcactggggaggggagcgagcgggggcagggaaatgagggagggtcctctggggaggagacagggaccctgcgttcatagcgggaattaacaagggcagaagaggaaaggcgcccgagaggagccccacggcacgctcactaccccacagcaaggctgctctccgctgggcgccacagctcacgcctggaaccccagcactgtgggaggctgaagcaggaggatggcttgagcccaggagttcgagaccagcccgggcaacacagtgagacctcagcttatctcttttttttgagacggagtctcactctgttactcaggctggagtgcagttgcaccatctcggctcactgcaacctccgcctcccaggttcaagcgattctcctgcgtcagcctcccgagcagctgggattacaggcatgcgccaccacacccagcaatttttttgcatttttagcggagacggggtttcaccatgttggtcaggctggtctcaaactcctgacctcaagagatcctcctgccttggcctcccaaagcgctgggattataggtgtgagccattgtgcctggcctctcacgtcaccaatttaacaaaaattaaaataataaaacatttaaaaaggttgtcctctaactgtgccgggcgccccgtcagtgtgtagagaccagtgggtgagctggcagctcccgtctctccaggccccacaacaatggggtttcctgctttgtgaggacgtctaggaccagtgagcgctcaagcccgtccatcggccgccacgaggcttcacgttggtaactcagaggttttgtgggtttgagagaagaagagccagcagggagccccacggctgcccccctcgtcccactgcccccctcgtcccgctgcccccctcaccccactatccccctcgtcccgctgcctgcctcggccgccaccccactcacctcgcatgtactcaatggtgccgtccagcacaaggttgaggagtgggtcgaagcccttcaggattccactggcttggagaaatcaccgggggagagaaaagagaaggcatgagatccgtcctgggcgcagggcccgccccagcatggcccaggtatggggctaactgctccagggatggaggactgagggtaggagagggctcccgggagtggccgatgacagccgcctccagagtgatctccaccacaggcagcagaccacgtctgcggggggccagatggcaaacacttctggccgtgtgggccacagggtgccggtcacagctgctggctcgggctgcctgggtggaggcagcttcggtaatgagtccatgtgtggctgaactgcggccggtcagctctactcacaggcactgaactgtgaatttcatgtaatttccacatcgtgagacagtcttgttttgatccctttctagctatttaaaagtcataaaaacaattctcagctcaaaagcagcagcaaaacaggcggcggcacgtgtacgcggtgggaccaccagccaggaagaggagcgaggctggcgcaggccacagcgcggatgcgcctgaggacgcacctgaggacgtcacgctcagtgagagacgccagacacagaaggctgcgcaccgtgagatcccatttctatgaaatgtccaggacaggccaatccacaaagacagggaagggatgcgtgggtgccagggccagggatgggacaggcagtgatggctgatggggacagggcttcctgtaggggagacagagtgctccgctctgacagcggtgatgactgcgctgcctgacctgtgctgagtccctcagtgagttcacggaatacaaaagaacaaatcccagccctgctgcttagggcttgcggggagcaggcaacagagatgctctgagacccaggtgcaaaggcttcgggggctgagacggtctctgtggcttctctctccacgctgcctgccccacccctcaagcttcgccgccttgggccacaacttgccaacttaggttagggctctctgacccggtggtgatctctgccatctgatcctgctccgcagtgtctggtgacactgagaagggtgaagggggagctgtgtgtccccagcagaggccagcccaccctctctgcctgggactcccctccactgccctgcaggctcctgcagccgaggcccagcagcagctccacctctgcgctcactgaggggcgtcccgcagccaccccctccctgctctccttcttacccctgtcatctttcaggtgcttcctccagacaccaacccacagcccttacggtgctgccctctgcacgcccacgccaatctcaggaagcaggcaccaccaatctcgggaagcaggcaccaccaatctcgggaagcaggcaccccgggcattattctgcctgcctgtctcctcccaaggcagggccgagagcccgtccacggctgctccacacacaccgagggccgccctgtgcggtggtgcgggggagggtctgcaaactacgacccccaggtgaacctgcccgccgctcctctctgtaagtcagagtctcgctggcccaccaccacactcgcccgctcaggcgctgaccagggtggctctcctgctctgctggcatagctcagtggttgtgacagagaccatctgggctgcaaagctaaagatatttgccgtctggccttctacagagaaggtctgcccgcctgcatacaagcttccgtccacctccacaggcttcagcttccacctccacggctccctctctctttgctcaagtccctcccctgcaaaatgaaactcacctataagatggggtcagatgcagatgttcaggtccttggcaccagcctgaccagtgagcccgccctcctcacggggagagatgtgagcactgaggtaggtaggtctctaacatggagccaaggtgcccctcctctggagtgtgggctagggcctgtgactctgacgggacaagatgtcactcctgcgcttaggttatgtggcaaagacaaggaactttgcagctgtaattagagcccctgaatcagctgactgagccaatcaagagagaaacaccctgggtgggcctgactgcatcaggtgagcccttcagggaccaaaccctttctgctttttgtgtgtgtgtgtgtgtgtgtgtgtgtgtgtgtgtgtgtgtgtgtttgagatggagtcttgctctgtcgcccaggctggaatgcagtggcgcgatctcagctcactgcaacctctgcctccagggcgattctcctgcctcagcctcccaagtagctgggactacaggcatgcgccaccatgcccaaataatttttgtatttttagtagagatggggccttgccatgtaggccaggctggtctcaaactcctgaactcaagtgatctgcccgcctcagcctcccaaagtgctgggattacaggcgtgagccacagcgcccagttaattgttgtacttttagtagagatggggtttcgccatgttggccaggctggtctcgaactcctgacctcaggtgatccacctgccttagcctcccagactgctgggattaaggcgtgagcccccgcacccggccccaaaccctttctgaaagatgattctcccactggcccgaataactgaatatggacaaatgtcagctcagcctgcagcactgtaggggcagaccaccacggtggaacagagtcccgagctggcagcgtccgggagctgcaagtgtccctagccaacactggccagaacggggaccctggccctgcaaaggtaaggcactgagctctgtcaataaccagtgggctcagaagaagaccccaagatgatggaccccaaaaaacaaccctcagttacaacctcctgagagcccttgaggctgtggtaccctggctcctgactcacagatcctgtgagataataaaatggtgctgtttcagctgctaaatgggtgatttgctatgaagggcagaaaacaaagggaagcagtgtgaccagcaagagcggccgctcactcatgtccttccatgtccggagtcagcatggtgtagactgagaaaacattttattcatattcctttttctttttgttttgagacggagtcttgccctatcgccaggctggagtgcggtggcacaatctcgcctctggggttcaagcaattctcctgcctcagccccccgagtagctgggactacaagcgtgcgccaccatgcccagctaactttttgtattttagtagagacagggtttcaccacgtaggccaggatggtcttgatctcctgacctcctgatctgcctgcctcggcctcccaaagtgtcaagattaaaggcatgagccactgtgcctggcctcctttttctcttttgagactgggccttgctctgtggcccaggctggagtgcagtggtgcggtcatagctcactgcagcctcaaaccctagggtgaagccaccctcctgcttcagactcccaaattgctgggattacacacgtgagccgccccgtccggctggggcactgtgatttttaataactctcatgccacccagttgtctacaatccagggacaaagaggtttgggtccccgtcttacaaaaaaaagaaaccaaagatccaagaggctattgaataagtgacgtgttgtctgactgcttacttcctgctgagagctgcctcaattacattacatgcctgtaaccattcattctcaccaccccctgtgaagtgggtggagttaccagccccatttgacaaatgaggaaacggaggctaggagaaggcagctcacttgcccagtcaaaaatgctaggctgggcatggtggctcatgcctgaaatcccagcaatttagggggctgaggcaggcagatcgcttgaggccaggagtttgagaccatcctggccaacatggcctctctactaaaaatacaaatattagccgggcgtggtggtacacattaattccagctactcgggaggctgaggcacaagaatcacttgaacctgggaggcggaggttgcagtgagctgagatcgcaccactgcactccagcccgggtgacagagcgagactgcgtctcaaaaaaaataatgaaaataaataaaagaggtgcttccgcatgcgtcctcatcatctctgttgctgggtttatttgaaatttttaaagagggggtaccgacagcgggagcctcctcaccttcgcggcctccctggaactttacccggatcgtcttgtcgatgtacttggacaagtccaagatgctctcctttttcttcttctccttatcctgcggggaaagcagagcgcatgagacctggagcgcggcccgagctccacgccccccggctccagattccgccgcgcgctcaccgccatcttgtcgcgccgtgtggctcttcgcaggcaccgccccgcgccctttgacctcccccacgcgcatgcgcggcgcatgcgtggcccggggtctcggggcgttgctgggaaacatctgccgttggttgcggcgggcaccggccgacatggcggcagcggtggcggctgcgctggcgcggcttttggcggcctttctgctcctcgcggcccaggtgagcgcggcaccggtcccgacggcaccgcgggctgcggcccttcggcctctctgtccccgggctacgcgcaggaacgaccccgctcggcccgtcttgggggtccagcctcggggatccgccgtccccgcgttgtcggccggcggtgccggggctcggccgtgaccttgcgggtctgtccccggctcctctcctttccccgcctcggaggccctccgccgctgcagcgccactcacttcccaccgggtctgaaatttgtgccccctccatcctccggttctgcttctccgtttcggggtctccagttgccgccggggacgcctctctccggctctgtggccttgagcaggcggctgcccacccctctccgagcctcagtttccccttaggcggaacgggcacggtgctaagctaacctcaccctagggggtgcggtgggggaacccagaggcgtcccgcgcgtcccccagtaactggcagcatcctggagcggccaggagtccagccctgcactggggtcggatccccgctccatcttttactccgtgaccttggacgatggaattcgtgtgcagaaggaggaccgactatggtgtggattctggaggttctgtccagggtgaccagcgcccagggccaacaggccttcattatgttcattgtgtgtcatttgatgtaaagagtgtcaggttctagtggggacagtctacgagatcgcactgtcataactgcatcttttattttcttaattccaaatcttccctctctcctgagttcggtggctcaggcaatggaacctggagcagccccacaaatgcagcccttaaccttcactaccccctcagagttctcactcttaaggcgtcgccgccacctggctcctcagtctccactcctccagccccaccgctatccctctgctgtggctgcctttgtccaccacatccccagtccatcctcgacacagcaggggtgaccctttcaaagtatgtcagaccgtgtcgcatccagatgagtgcgccgtccagttgtgacctggctgctggggaagcctgcagctcattgcagtcgcttcactctctagtcttttctcttaccctgagatgcccctggtctctgcaaggctgtcgggccccctcggaagctttctgagaaccccagtcctacccccagctgctctgtcagccccctttggactccccccattctgcagccaggcacctagagctccccagacatttggaaggagggggaaagccagaggtggaagaaagatcacagaactctgtggagagagggactcagtttgcctgggaaggcttttccgaagcagatctattttttttttttgagacggagtctcgctctgtcgcccaggctggagtgcagtggcatgatctaggctcactgcaacctctgcctcccggttcaagcaattctcccacctcagcctcccgaatagctgggattacaggtgcatgccaccactcctggctaaatttttttttttttttttttagtagagacgaggtttcaccatgttggtcaggctggtctcgaacttcagacctcaggtgatccacctgcttcggccacccaaagtgctgggatgacaggcgtgagccaccgtgcccggccccgaggcaggtgttctgaatgatgagtaggagtttgccgggtcggcaggaggggaagggtgttggaagcaccagaagcagcataagcgggggctgggaggtgtgagagctggcaggttatttggggttggcaaggggtgggctgtggctggagtgtagggtggaataatgctggaaggaagggtttacaccctgaaagatgtcaccaccaaggaggcccggggggtgggccgtggagggttgctggagcaggggcacagaggagggggcagtggtgcgagtggccccaggcagagagtgaaggcagagcattcagcctcctagtctggatgacaggttgtctggtggaagccaggccgtggaaggcgcttggtgctggggtgcgtggactttaacctgggcgggctgaggagtgtgagctttatccggagggtggggagtcaaaggatgtgtcagagggacgtgagagagcaggtgttcctgccccttccagaaccctggttgtaaatacaccctgagacgcctgtccctggaggggggcagtgcttcgcggcagtggaaatttgagtccgattgcccaagaatgagacttgctctcagggcaggagcctggttggtgacagtcctcaactcgcttgcttgctaccattctgtgaccctgagcaaggaagtcgacctccccagtgagacacctcccttcccccaccccacggagcccgctcctcagcagatctgagctggagctggtggccctggctggacccggcccggctcctggaactcctcagtcttcccagaagggaggctctccccgcctggactcactggcctgtttcaaaggcccttgatgtggatgctttcacagtcacttggaagcggggtttctaagcctagtagtttctgaacctgtgtgcggttgcaaagcgtttgtgctgcaattgtgaaggatttggaggtcgaggcttgggctttgagcctgtccttgtagcctgagctttttctgctcctccaaatttcggtgggcctgtctagaactcagggccctcttagagctgtggcctttggaagaattgttccccgttcctttaactcagcaggtgaggaaactcttcccggtgagatgccgcgttctctggcctttgatagaggcacaggcttgtttttttaatggaaaaccagttttgcgaattgtggagaggaaaatgcatgaatgtgcttttgtgcttttaaatgacccttttagagagaagcagagaagcagttctatcagttcccattttacacaaaagacacttttcaccagagtccctgatcccatagaacagagcttggcaagtgttttctgggaagggctagacagtagttttgctgggctctgtggcccacgtggcctctggtttggttgcttggtttctcctgttgttcttccagagccggagacccttccttaggaatgggcttggctgtgttccaataaaactttatttacaaacacagaaggtgggccggactgtggattcttggcctctgccgtgacccataacatccctcctggaggaggggttctggggggctgtgttggaaggggcaccctccgggctcggcaccggggccagactaaggggtgctctcacgggcaggcagtctggtgggcagaactggaaagaaagggctcctgactctgcctgggctctgggggaggtcacatgggaggtgcttggagtggggctggggcagctgtgggaaggaagcagcattagccaagagctatgagacccccagtcgattgtggggaccggggctccgtgggctttcaccatgctgccaccccgaggtcaccagggccttgacccagatgctcccagaccaggccggagactttgcatgatttcagtgatgagggcccggctgttggagagcccgtctgtgcctgtgtgctggggttggtgtctggcaccagggacctttgggacctttagccaagccagagctgtccttccccagtcctagcttggcagagctgcgtctgcactgttttcccttgtggcgttgtggtgtcggcccgtttggtgcgcagctcagcatccgttcagacatgtggctgccatcctgttcctgatgaggcaaatggctgtggcctgtttgtttccgtgacaggtcccctggggaccagggggtgcggctgtctctctgtctgggaggtttacagcctggcaggagccctgcagccccagaaggctgagggctgggtgctcctgagaacgggcaggcctagggcatggggtgggtctccttggtccctggcacgtggtttttcttctgggacccctcctccctgtgcaggccgggctcccctgggggcccacactgagggtctgcagtgtggcacagcagctgggacctgggccccatcgctgtgagaccctctggtgactggcatcctggcgagatggagatgtctttgtcagctgctgggtgggggccctgggcaggggagcagaaggaaggtggggatggcaggtgcgggcggctggactgggctctgctgggagggggagcaggaggagggtggggatggcaggtgcgggcggctggactgggctctgctgggagggggagcaggaggagggtggggatggcaggtgtgggcggctggactagactctgctgggaggggagcaggaggagggtggggatggcaggtgcaggcggctggactgggctctgctgggagggggagcaggaggagggtggggatggcaggtgcgggcggctggactagactctgctgggaggggagcaggaggagggtggggatggcaggtgcgggcagctggactgggctctgctgggaggggagcaggaggaggtggggacggcaggtgcgggaggctggactgggctttgcgggagcaggaggaaggtggggatggcaggtgcgggcggctggactgggctctgctgggaggaccgtggttctgcctaggccagagccctgcagtgtccgccgtggtccctgcggtgggaggcgtggtgagcagtgccagcttcctgcttgtggaatccgtctttcctcatagctccatcctgctctgttaagcattaaattgaagaggtgggggtcgtcccttctggtccaggcccgtctactccgcagccctcctgggaggcgtccagggctttggggcctggtcctgccccctacttcattttgagagcgtggcaagggccccagcccgttctgtcctgggcgcggtggccaccacccctgcttctcttggctggctttggcctgttgtccccgttgtgtgtcaggggctcctgcccgtggatccgggccttctccctgtggccttctctgagctgctgctgctgcaggctggagagcaggaacttgaagccctggctggctgttccttctccctcctgcgaagtgggagctgctgtgctggactctgctgctttggggcttcatggggaacatgacgctgtctgtcctgctggtggcagcgtgacctgttgcaaacctcagcctgtcccactcaggacccggtgcccgtaggccccttggcccacctgcttcctgctgttctaccagtgggagctgaggggtgctgatctggggatccccctcgtctgggccccaccgtgtgcctgggcccccgtgtgccttggagcaccagccaacaagcagtgcccacggggctgtgggtcaaaggccacccagacctgaggggtgcagaggcttgcttgtccaggcctcccgcccaggctgggggccaggtccgctggggccctgccctgcttccctgctcagggctctgcccgtggctctgcccgtggctgtcattctcccaccgtgcccactgatcctgggaggcccaggaggtggtgcgatccctgttttttggtgcagaaactcgggagccacaaaggggtgacctgacacactcatggtcaccagcctggggctccctgaggaaggtgagccagtctgggtctttgctgtaaaccacgtatggtcacgtccctgtctgtcctgtcgagagggggaagcatcccagaccacctggtgaacatgggcgcccttcctggaggcgtcctcccctcctcgggcctgtttctcgtggggcggtgcagccccgcacgtcccgtgctgtggctctgactgctggccttgtcctgcaggtggcctgtgagtacggcatggtgcacgtggtctcccaggccgggggccccgaaggcaaagactactgcatcctctacaacccgcagtgggcccatcttccgcacgacctcagcaaggcagtgagtacccgctggccgggcgccgctgcggaggagaatgcgggggccccggggctctagagacacatccggctggggttgcaggaaagatccagaggcgagaggcaggccctgaccaggtctgggggactcttagctggcccccagttcccctgggcctccccaaccctggtcatcaatgcaagctgtccatgcggccttggggtgcagatccagaggcaccggccgagctccatgtggtagataagggtctctactgctccatgccggggaccctatccagtgggcccagacagaggggtcctcagaggagtaacagcagagggcacagtggggccccagggacgagacctgttcctttcaccgtcttcctgactggggcactaacacctgctgctggatgagtccctccctcagaggccccacctcctttcccacttagtcctcatgccccgcctcctttcccaccgcatccctcaggccccgcctcctttccactgcatccttcaggccccgcctcctttcccactgcatccttcaggccccgcctcctttcccactgcatccttcaggccccgcctcctttcccactgcatccttcaggccccgcctcatttcccactgcatccttcaggccccgcctcctttctcactgcatccttcaggccccgccttctttcccactgcatgcttcaggccccgcctcctttcccactgcatgcttcaggccccgcctcctttctcattgcatccttcaggccccgcctcctttcccactgcatccctcaggccccgcctcctttctcacttcatccctcaggccctgcctccttttccactgcatccctctggccccgcctcctttcccaccacacccctctgtccctgcctcctttcccactgcatccttcaggccccgcctcctttcccaccccatccctcaggccctgcctcctttcccaccgtatccctcaggccctctctcctttcccaccgcatccctcaggccccgcctcctttcccactgagtccctcaggccccgcctcctttcccactgtgtcccgccccctcctggagccctcgaggtgtgccggcgaagaggcactagcatcttcctgtcagctttatgcatagtgtgtgcgtgtgagcacgtgtgtaatcagtatgtgcctggacatgctcatgtgtctgcatgtttatgtgagtttgcatcagtgtatgtgtgcatgtgcctgagtgtttttttgtgtgtgaacacataggtgtgtgtcaacacatgtaataggtatgtgaacacatgtaataggtatgtgtgaagacatgtgcctgagtgcatatttctgagtttgtgtgtgtgagcacatgtgtactagatatgtgcatggacatgtgtgccttagtgcgtgtttgtgtgtcagcacacctgtgtgtgtgagcatgtgtgtaataggtgtgtgggggcatgtgcatgggtctgaatgtgtatgtctgtttttatgtgcacatgtgcctgtgagtgtgcatgcaatagttttgtgtatggatgtgtgagtgcatgtgtgtctgtatgtgtgcaggtgtgtgtaagcatgtagctacataatagttatgtttgtggatgtgtgcatgtgtctgcacatgtgtgcgtgtgtacatgtgtaataggtctgtgtgtatgtgtgtgtacatgtggataataggtttgtgtgtggatgtgtatgtgcctgtgtgtttgggttcgtgtgtgtgcatgagtgtgtgtgagtgcatgtgtaataggtatgtgcgtgtgagtgtgtgagttcatgtggcgtgtgtgtatgcatgtgtgtgtaataggtgtgtgtgcgtgagcttgagtgcacaggtatgtgcttgtatatgcacacgtgtgctgtgtgctctggcctggctgtgtgtgcgtgtgtgtgtgcatgtgtgtaataggcatgtgtctgcttgagtgtgagtgtgcatgtgtgtgcttgcgtgtgcatatgtgtgccatgtggtccggcctggctgtgtatgtgtgcacgtgtgtgtgcatgcactccagcctggctgtgggtgtgtgtgtgtgtgcgcgctggcctggctgcggctatgtgcgtgtgtgtgtgtgtgcactccagcctggctgtgggtgtgtgcgtgtgcactggtctggctgtgggtgtgtgtgtgtgtgtgcatgtatgcatgtgtgtgccgtgtgctccagcctggctgtggacgtgtgcttgtgtgtgcgcgtgttccggcctggctgtgggtgtgtgtgtgcgtgtgcgtgtgtgtgtgcgtgtgtgtcttggcttcaggggctgtgaggcccctgagagttggggctttgttctctgcacactggaaaccctcccccttctcacagatgcctggccgtggtggggctgcggtggggacccacttggtcttgctgagtgatctgtgacggctcgcggggtggctcaggtatcaggggacagccatgtctgtgaggactccggccccgctcagatgaggcagcccagcccgtcgcccagggtccggctgtgggagctgcagtagggatggctctgcctaggtgggccgaggccgtgcggggctttaggtgagggctgggatctaactcagcgcaggcttcaggtgggagaacgggcagctgggccctcctggtgactcacatcacgtgagacaacactgtgccctggcctttccagtctttcctgcagctgcgcaactggacggcctccctgctctgctccgcagccgacctccccgcccgtggcttcagcaaccagatcccgctggtggcgcgggggaactgcaccttctatgagaaagtgaggctggcccagggcagcggagcacgcgggctgctcatcgtcagcagggagaggctggtacggccctgtgcgtcccccgctgggccagctctcaggggcaggaggggggtgcaggaggcagagatggcagcagctggggctggtcttccgacttctcgctaaaggcagatccatctgtggggaggatctgggccgagtgtgaacatggggaggatccgggccgagtgtggccgtggggagggcggagatgagtctgttcttcctgagctgctggctggggctgtggaactttggccgtggtcttgttgggtgcctgtcctagagcagcccccaggggtgacggagaccacactctctgtggggatgggattggggtggcttctgaggagcaggtggcctggccctgagctggtcctttctgggtaccctggtgcccttgccctctagccggtggggccgtgctcgcctgtggtcctagccaggtggcctgaagcctggccccttttccatcttctgtgaaatggggctgtggttgagagctgggggcctggcagggctggtcacagcacagggacatgccgactgctgggctgggcagggtgcgtggccgcccctgaagtgtagttttggagtaagaaggaatggagttcaggaattccctcacagctctgcctgtggctctgggctgcccccgccagtgttgcaccctgagcctggcaatccacggaggcctggtgcaggggctcagggccgagggcagagcaggccgggcagagccgagagtgccatccctgtccgcacacgctgccgtcgtagttgagagaggccctcagtgggtgcggggctcaaggcggcttagtgggcaggcatgggctgtgacaagtatcactcaggacttgtatgtgcggttcgggagtcccacggccgagggagggattagtggcgcttttaggcctggggccctgttgtcaggtgaagaaggcttgatgcccttcggcctccctgttcttgggtcctcctggggggccggaggctgtcagctgcagagggggagccagcaggcgcccccagcctgacccgagcctcgagtgagggtcccaggagaggaggcgaatgggcacagagctgggggcccacccactgctgcgggtgatgcctgccgctccctcctctgggcccccaggtccccccggggggtaataagacgcagtatgatgagattggcattcccgtggccctgctcagctacaaagacatgctggacatcttcacggtaggtctgcgccggctcagacccacgctcccgaggagatggggcagggggcttcgggctggctgccgggggggtttgtgcctcagttggtgggatcagggtggtgggtgaggcgtggcccctgcaggccagggtctccagccccagccccacagcccacagctgcacgtcgacccatggctggcgggtggctctgacgcctgcctccggtgtgttccttgaggcagcgtttcggccgcacggtgagggcggcgctgtatgcgcctaaggagccggtgctggactacaacatggtcatcatcttcatcatggctgtgggcaccgtcgccatcggcggctactgggccgggagtcgggacgtgaagaagtgagtttcgcatcgtgcgtgtgctgtgacggggtcgggcggctctgacacgggccgggacggccagtcttccagaacagcagtgagtgctttggcctcggcaggcacggctcgccccgtggagcccttcgtttcttcctcaggaggtcctgggacagaatcagtctcttttcctgccagggtgggctccgggcacctggtgggtgtgtagggctgggcaggtgtggatgtggcaggtacgggcgtggcaggtgcagggctgggcaggtggctggggccagctaccctcttcctgctgagccgcctgggtctggggaggccccatgtccagggctctttatgcagatccaagctgcggttgctgcccacacgccagcctctggcccggcctagtggccaccccagctcaacccagggacgcgggccctgccaccctctgctgtgtggtctcctctgccctggggacgttcggggcggttccttgcacttcagtcccccccgggtcccctcctgctcccgggttttctgccccgttcccccgggtggctgtgggctcccgagccccgtgtcggccagccggccccagggccccacgaccccatggtgtctcccaagaaggtacatgaagcacaagcgcgacgatgggcccgagaagcaggaggacgaggcggtggacgtgacgccggtgatgacctgcgtgtttgtggtgatgtgctgctccatgctggtgctgctctactatttctacgatctcctcggtgcgcggccccgggcgggtgggccgcggcgtggagatgcagcccgccccgtgcggagggagggtggcgtgcgggcctggcccccggcctcacggccctgcccctgcagtgtacgtggtcatcgggatcttctgcctggcctccgccaccggcctctacagctgcctggcgccctgtgtgcggcggctgcccttcggcaagtgcaggtgagtctgccctgctggccccgacgtgcctgactctgtgcggtgatggccacggcccctttgccgccccatagccccccatggtgcaatattgctcagagtctacagcaggcgctccctcagtgctggcctggggctcctaggcccaggagcagggcggagtctgggcgagctatcaatggagcccaccagcagccaggcgccaggggtggcggggggagggtgcccttgtccccaggaaccctgccccaggtcgcaggccgaaccctgggttccccagggttctccggggaacccagaaggttccccacagcccagagcttggcctggctcttaggggtaaagggagctgctggggggtctccaacaaagtcagacctgggtctaggaagcggggctagcccagggggagacctttttgtgttgccgtccctgggtgaggaggtgggaggtctggagcaggcagggcctcgggcgaaggggcgcagcgcaggcgaggggctctgtgggtacagcccgtggcccccagcgcctgcccgggtcgggctctgccctgcccttggggtgcctactgttgtcatcgtgtgggatgtggagtttaatgaggacaacagagtgggggctgccactctgcagggggtgcctgggccggtcccaagggtggtgggcagtgggatgaggccgggagctggtgggcttggctctgactgccccgtgccccccaggatccccaacaacagcctgccctacttccacaagcgcccgcaggcccgtatgctgctcctggcgctcttctgcgtggccgtcagcgtggtgtggggcgtcttccgcaacgaggaccagtaagtgctgcttcccccgggccccggcgggcagcggagtcctcgggtgcaccagggctcctggggccctgactccctgccctccctggaggccgccccagcctggagctgcttcagcaccgcgtgatgaagagccctggccccgggctgctctgacagggctgcgagggcgtttcacctggggtttgtccgggtgtcatgggaaccctgactggaatccgggaggagaggccggagcccctgtggccaggagccacgtcctccagcctggatgggactcctttgtggggcatcgctgcccagggccacagtctgtcccccgctgtccctttcctggcacccacgtgcacgccgcaggttcgaggcccagggtgtgggcaccagggcacccggtcctcttggtcatgactgctgcggcttctgagcagtggtggaggtggggcaggcactgctccccccacgctcacctcccacgtggcctggacttgtggctgcctcccgctggccgggcctcccccatgaggccgagtgcctggtgccgtgttgggaggacagagctggcccgtccccgcccggtccccaccgctgtcgctgataccatctggcacttcctcccagccttcctgaggcagccaagtacgcttggctttggtgtgtattggagccacggcacgtttaactggcagaaggaagatgtgaaaatattttgaatcctttgtacacaaagagaaaatgaatcttttcagttatttccaagccaggaaactcgctccgtcacatgaagttagagcaggcctcagtcagctgggcgcaggggctcacgcctgggatcccagcatttggtaggccaaggcaggacgatcactttgcccaggagttcaagaccagcctgggcaacaagcgagacgccctatttaagaaataatataaaatcagaaaaaataactggccgcagttctctgggtgcttgaagtacgtggcgcctggaattggctgtaccagcgtctcccatggaggcctctgctgttagcagccgccccgccctggagatgtttttatcccattttcaaatgaagcctttgatgtttgagacgctgaggaacgctggggaactcgtccagcaagtgacaggcagagcctgcattgggggcaggggccagcggggaggggactctggggcttcgtggggccaggagagagccgaagttgcggctggctgcaggggccgtggccttgtgcaggaggcagttctgtgctttgccccagggcaccaaccgcatggcagccccacccactgtggacccagaggttctttgaggaaacctggtgtggcacaagttttaatttaataaacagtttgggcacgggggctcatgcctgtaatcccagcactttgggaggtgaggcgggcagatcacttgaggtcaggagtttgagaccagcctggccaacatgacaaaaccccatctctactaaaaatacaaaaaaatttgcctggcattgtggtgtgtgcctgtaatcccagctacttgggaggctgaggcaggagaattgcttgaacctgggaggtggaggttgcagcgagtcaagatcgtgccaccaaactccagcctgggtgacagagtgagactccatctcaaaaacaaaataaaaacagtttggaggggtcagtgcccaagccctcctgcgcacgcaccctctgcctggcccctgcctacagcctgtgacccctgcctacagcgtgacgcccaccatccggggacagtgactgaggggacgcagccggccaggcccgtgtccaccatcctggccccaccatccggggacagcgactgaggggacgcagccggccaggcccgtgtccaccgtcctggccccaccatctggggacagcgaccgaggagacgcagccggccaggcctgtgtccactgtcctggctgccgagtggtgggctcctctacctgcttccgcagggtgggccctggggtggggcctgtgccgccagccctgctggagttgtaacagcaggggtcctcccacaggtctggggtcctcagagtcatcccctgggcaggtggaagggcagtggggctgcgtgctggctgagagcaagggccctgtgtggctcgtgggaggcggcgtcctgggtggtcagccagcctctgccccggcgaggatgctgctttgtcttgcaggtgggcctgggtcctccaggatgccctgggcatcgccttctgcctctacatgctgaagaccatccgtctgcccaccttcaaggtgagtgcagggagggcacggctgcggggcagcatgggtagtgggggcccttcatcctagcctggcccgtgtggggctgtggtccttgcaggtctgtgctcctgctcactgccctggggatggccgcctaggcctgttgtgaagggtggggcttgaagattgggtcccaaagcccccgctgaggcggcctgggtgggtggctgcggggcggttcccggcaggggcaactcatgtctagatgaggtggtggtgagagtggttgaatagggctggaggaactggcctcaggtggtaccgggagtgcggggatgttgtcaagccccaggcggctgcactcccgtgagggccccacagcaccccaagcaagcggcatttgaatgcccaggatggccctctgtatccccagagccggccctgcgtggcacaggcctccgccctcccgtccccgccttcctgttacgtggagactctaaaagcctgacttttgcccgtaaatccctacctgatgttgcttccaaagctcctcctgcgtggtgcgtccctggcactgggcacgctctgctcaggttcctttaaaggctgcctcccaggaggaggcgctgggcctcatgagatgggagtgggggaggcacgggccggggtgggggccgccctcagccgtgggcttcgcaggcctgcacgctgctgctgctggtgctgttcctctacgacatcttcttcgtgttcatcacgcccttcctgaccaaggtaggcgactgcctgtccctgctccaccccatcaccccgctcccccgccccctcgcaacccccgccccatcaccccccccatcaccccgccccctcgtcccgccccctcgtccccctccaccccacaccgtgctcccctgccccccaccccatcaccccgctcacctccaccccatcaccctgctcccctgccccatcaccccccatcaccctgccccttgcacccccccatcgcatcaccctgccccctcgccccatcaccccactcccctgcccccccaccccatcaccacgctccctcactcaaccccattctgtgcagagtgggagcagcatcatggtggaggtggccactgggccctcggactcagccacccgtgagaaggtgtgtcttctgactgcagggtctcaggttgccatgggtcaaggtgttgcgcggagcggatagggctcgaggcatcccgcggccgggtgagggtcctggaggacattgtcctcttcccgtctttgcagctgcccatggtcctgaaggtgcccaggctgaactcctcacctctggccctgtgtgaccggcccttctccctcctgggtttcggagacattttggtgccaggtactgaggcgggtggagcacacgggtccacgctgtggggcagggccccgggcggctgaggtttgcctttgggagtgagtggcccgcacaccgtcggctggagataaagccctgagggtcagagtcgggcaggttggggccgttgaggcctgggtgcctgggcagcgagggcattgcctgggtggggtagggaccccctttgttcctagggagcggggaaggccccccgattgcagacagcctcaccccatcctgctcggggttgtgcaggggtccttgctggggcctggatcccgggtcccagtgagctcatgttgctgcagaaggcagagactgtaccctcgcagcctcagtgtccccagggtcctgccaggtgtgtctgcctggactttgttctcactgtggtctcagtttacccactgagagtcatggcagccctgtcccgagcgagcgtgtggcctgtctgtgaaatgacagcagccaccaggcagcgagaggcccacggcgcccacaggtgctcaggtgcccgcccgctcccaggaagcccctgctctgaggctctgcgggcccgagtaagcctccgccctgtgcctcccccagggctgctggtggcctactgccacaggtttgacatccaggtacagtcctccagggtatacttcgtggcctgcaccatcggtaagtgcctcggttgggcccgtgctggcctctctggctccagccccaccccgacttagcctctgtcctgaccctgacccctaaccccaaccccaaccctaaccctaattccaactctaacaccgtaaccataacaccctaaccctaaccccctggccactccgggagctgggctcgggtggctgggcctgtgcctgcatccccctctttctcattctccccgggcctgtgcctgcaaccccctctttctcattcttcctgggcctgtgcctctgtccccatcttcctcattcttcctgggcccgtgcctgcatccccctctttctcattctccccgggcctgtgcctgcaaccccctctttctcattcttcctgggcctgtgcctccgtccccgtctttctcattctccctgggcctgtgcctccgtccccctctttctcattctccctgggcccgtgcctccatccccgtctttctcattctccctgggtccgtgcctccgtccctgtctttctcattctccctgggcctgtgcctccgtccccgtctttctcattctcctttggcctgtgtccacatcctggtctttctcattctccctgggcctgtgcctccgtccccgtctttctcattttccctggcttccattgttctgttcttttcttttccttttctttcctgttttcctctttttgtctttttcttctttgccttgtcttctactgtttcttttgttatgaacgtatttacgcaaagtgctgttatctgttgacccacattgttttgaaaaatgtcccccaccgcagctggccctaaggaaagaagctgtggtgctttctggttcctgggcacagggccaggccaggcctcctctgccgagccacgcccccgaccctgccctccacgtggctccctaaacggccactcccagggccaggagagttcaggccggcctgtcccctcacacctgcctcctgcagctgcaggtgcccctggctttcccctcgcccgattttactgtcttcatgattatcctttaaaatcacggctgaggccgggtacgggggctcatgtctgtgatcccagctttctgggaggctgaagtgggaggattgcttgagtccaggagttcaagaccagcctgggcaacatagtaagaccctgtctctgcagaagaatgcaaaaattagccgggcatggtgacatgtgcctgtagccccagctactctgcaggctgaggtgggaggatcgcttgagcctgggagttcaaggctgcagtgagccatgatcgtgccaccgcactccagcctaggcaacagagtgagaccctgtctcgaaaaaataataataaaatgaaagaaaaaataaaaacacagctgcagagatttgtctctcctgaaacataacttgtcaagttgtccctgtaattcctgagactgaagccgctgaggctttataggtgccagccctccctgtttgtgtctgtctgcgtctgttgatgatggctgatggacacgtggatggcctaaaatggaccaatagggacgctccccgtggcatggcgtcagaaatacagagatgggtgttagaaaaagtgccgggagcagtgtgcttgctggacacagcggctctttttttaagagtgttctagcaaataattaattttctcagagctttattttgaaataatttcaaatgacagttgcaggatcgctacagagaactcccgtgtgccccgttctcagagggactggtcatttcttcacattcgcttgattccgttctctctccctccacacacacttacgcgctctcattcacctgattccgttctctctccacacacacgcgctctcattcgcctgattccgttctctccctccacacacacactcacgcgctctcattcgcttgatgccgttctctctccacacacactcacgcactctcattcgcctgattccgttctccttctctccacacacactcacgcgctctcattcgcctgattccgttctctctccacacacacacactctcattcgcctgattccgttctctctctccacacacgcgctctcattcgcctgattccgttctctctctccacacacacacactctcattcgcctgattccgttctctctccacacacactcacgcactcttattcgcctgattccgttctctccctccacacacacactcacgcgctctcattcgcttgatgccgttctctctccacacacactcacgcactctcattcgcctgattccgttctctccctccacacacacactcacgcgctctcattcgcttgatgccgttctctctccacacacactcacgcactctcattcgcctgattccgttctccttctctccacacacactcacgcgctctcattcgcctgattccgttctctctccacacacacacactctcattcgcctgattccgttctctctctccacacacacgcgctctcattcgcctgattccgttctctctccacacacacacactctcattcgcctgattccgttctctctccacacacactcacgcactcttattcgcctgattccgttctctccctccacacacacactcgcgctctcattcgcttgatgcggttctctctccacacacacactcacgcgctctcatttgcctgattccgttctctccctccacacacagactcacgcgctctcattcgcttgattccattctctccctccacacacactcatgcgctgtcattcgcttgattccgttctctctccacacacactcacgctctcattcgcttgattccgttctctctccacacacactcgcgctctcattcgcttgattccgttctctctccacacacacacactctcattcgcctgattccgttctctctccacacacactcacgcactcttattcgcctgattccgttctctccctccacacacacactcgcgctctcattcgcttgatgcggttctctctccacacacacactcacgcgctctcatttgcctgattccgttctctccctccacacacagactcacgcgctctcattcgcttgattccattctctccctccacacacactcatgcgctgtcattcgcttgattccgttctctctccacacacactcacgctctcattcgcttgattccgttctctctccctccacacacactcacgttctcattcgcgtgattccgttctctctccacacagactcatgcactctcattcgcctgattccattctctctctccacacacactcacacgctgtcattcgcttgattccgttctctctccacacacactcacgctctcattcgcttgattccgttctctctccacacacactcacgctctcattcgcttgattccgttctctctctccacacacactcacgcgctctcattcgcttgattccgttctctccctccacacacactcgtgttctcattcgcttgattccattctctccctccacacacactcacgcgctgtcattcgcttgattccattctctctctccacacacactcacgcgctctcattcgcttgattctgttctctctctccacacacactcacgcgctgtcattcgcttgattccgttctctctccacacacactcacgctctcattcgcttgattccgttctctctctctccacacacactcacgcgctctcattcgcttgattccgttctctccctccacacacactcgcgttctcattcgcttgattccattctctccctccacacacactcgcgttctcattcgcttgattccattctctccctccacacacactcacgcgctgtcattcgcttgattccgttctctctctccacacacactcgtgttctcattcgcctgattccgttctctctctccacacacactcgtgttctcattcgcttgattccgttctctctccacacacacgcgctctcattcgcttgattccgttctctctctccacacacactcgtgttctcattcgcctgattccgttctctctctccacacacactcgtgttctcattcgcttgattccgttctctctctccacacacacgcgctctcattcgcttgattccgttctctctctccacacacactcgtgttctcattcgcctgattccgttctctctctccacacacactcgtgttctcattcgcctgattccgttctctctctccacacacactcgtgttctcattcgcttgattccgttctctctctccacacacacgcgctctcattcgcttgattccgttctctctctccacacacactcgtgttctcattcgcctgattccgttctctctccacacacactcgtgttctcattcgcttgattccgttctctctctccacacacatgcgctctcatttgcttgattccgttctctctccacacacactcacgcgctctcattcgcttgactctgttctctctctccacacacactcacgctctcattcgcttgattccgttctctctctccacacacactcgcgccctcattcgcttgattccattctctctctccacacacactcacatgctctcatttgcttgattctgttctctctctacacacactcacgcgctctcatttgcttgattccgttctctccctcgacacacactcgctctcattcgcttgattccgttctctctctccacacactcacgcgctctcattcgcttgactctgttctctctctccacacacactcgcgctctcatttgcttgattccgttctctctctccacacacactcacgcgctctcattcgcttgattccgttctctctccacacacactcgtgctctcattggcttgattccgttctctctccacacacacacttgcgctcttattcgcttgattccgttctctctctccacacactcacgcgctgtcattcgcttgactccgttctctctccacacacacactcacgtgctctcattcgcttgattccgttctctctctccacacacactcgcgttctcattcgcttgattccgttctctctccacacacacactcgcgctctcattcgcttgattccgttctctctctccacacacactcacgctttcattcgcttgattccattctctctctctccacacacacactcacgctcccccgtgtactgcagttggccctcactagccatgggttcctgcagctgtggatttcactagctgtaggttgaaaatatttggggaaaagatttgtgttcttatctgtactgaacacatgcagattttttgggccagttttcccgaagcaatgccatgcgacagccattgcctgcggcgacatcacgtttgcgtttgtaggaacctatggtgatttatggtttggcaggacgcgggtgggttctaggcagacactgcaccagtttacgtcagggacatgagcaagggggtcctggcagccctcccctgcgggtgccaagggtggccatgtgtgcgtttgtgtatttacatgcacacgtatgtaaatcacaggctgcgttctcaggggactgggggcacggccccggtgggtggacaccgtgccctttgaccccaaacatttcactgggtgtctcctgagaacatagtttatatgcccacagctcagtgttcaagggttttctggtcaggcacatgtgtcaccttcggctgattttctcagaggttcatagaaactgcatcccagacacgtctcgcagccccctccgctatcacgtctgcctcccgctgtcctgcagctgcccggaccctgcccctccctgtccctctccttgccctggcccttccatgtcctcggtgaccctggctccggtagggtcagggtgggattgtggcccaggaggtgccggaaggatccatgtactttggggagcctgtggccctgccggctgaacccccactgtacctctcccgtcctcgcacacccctgccctccaccaaccccagcccgctcacgttcttcccagggaaatgggtggtggccctggcctgcctggctgaggtgatgcctcctctgtccccacagcctatggcgttggcctccttgtgacattcgtggcactggccctgatgcagcgtggccagcccgctctcctctacctggtgccctgcacgctggtgacgagctgcgctgtggcgctctggcgccgggagctgggcgtgttctggacgggcagcggctttgcggtgaataccagtttgctctgactgtgagaaatactcgcctagtgagccctaactagagttaaagttgagtgagacctccagccacagccagccctgcggccgcgacggggctcagggtcctggtaccttctgctttgggtgtcatgcgcgtgaggccccggtggaaggacgtgcgtgcagctcctgtgccgggtgggatgcgggggtgccaggtggggcccgggggtgccgggtgggacgcgggggtgccgggtggggcccaggggtgccgggtgggacgcgggggtgccggctgggactcgggggtgccatgtcctttctaaagttgcttctcccaaatagtagtgccccacctgcgtgggcatcgggcatccatcgcctctcctgccgagagcgaggcgcctgactgggggtggggccgcagggccctggacgaggggagcaggcctgccctggctgtggaagccctgtcccctgtcccccttggcaaggcagggggtggttggcaagggttaaacgtgagatgcagggagggcttacgccacgtcggttctgctcttgtgattttttgtgaacaggagtgggtgggacccccccttccagtgtgccgctcaggtgacttcctgggttcccgggactcaggcgcattgcgcccgagagctgcccccgcccctccgggcagcgcctcttggagtccatgaccgcccagggagcagccctgcgccatagggcgatcctcaggctgttgggcatgggtgcagctcctcccatagctgatctccctctgggggagatgccgcgcttctcagcggtgctggccgcgcatggggtcctacgtcatgtttttgtggaggttaaaccacacccgtccctgccgcactggtgtgatgcattgggtcgagctgtggttccagtgccgagctgggctcatgggtcccacagatgggaccatggcctgagaccaggccccagggagaagtctcctggggccagcacccccaccccaaaggtctccccattctgatgggcatttcagaaggttcaggagaagccggggaccaggcccaggggcgagagacggtagtccaggcttttctttggagaggctttgcacagctcccagcctctgctggcctcggatggccctcccgcggcacctgtgccgatggacagggtcctgggtgcccgtaggttatggagccggccccctccttgggtccagagcccctggggatggcgcctcattttgaccctgcccccgtggcctgcgggtgctgggtgtcctggcccctgccagggtcctcctctgggtccctgtctccgcctcacctctgcctcccttctcctgtagaaagtcctacctccatctccgtgggccccagcaccagccgacggcccgcagcctcccaaagactctgccacgccactctccccgcagccgcccagcgaagaaccagccacatccccctggcctgctgagcagtccccaaaatcacgcacgtccgaggagatgggggctggagcccccatgcgggagcctgggagcccagctgaatccgagggccgggaccaggcccagccgtccccggtaacccagcctggcgcctcggcctaggggaggggtgagacgctcgctgccgtgcccgccacaccaagatgttggggctgcctggcgcccactggagacagacagacagacgcctgtcccccgggaccgaggcctgtgccgtccccacccgccccaacatggtgctcatccttgccgagacccctgcggtctgtgcccgcgcccagcccagctgccccggctgcacgcctgctgctcccagctcgcccggctgccacaagctctctgcgggtccatcctccccaccggggtccgtcctcgcaggccctgcccggcctctctgcagaccctcaagcgtcgtctgcatgagtgagcaggcgtgggtggactctggccgcggccacacttggtgctcaccagctgcttcggccttcaggtgacctccctccccacggcatcctgctctccgggtggaagagcagctttctgtctcccagaaggcatcgcttttccctcttgagcagatcggagcccctgggaggtttggaagctgcctccaagcctaggacacggaccagtggccggggcggcctctggcccctgacgctggctgagacaggcccgtggggcggggttttggggcgtgaacaaggctggcagtaagtggacaagctgctcccctggctaaggccctgccctgccctcagccagaggtgcctggccatgcctgcacactcctccccattttaataaatggtcgcaacttctagaagtcctgctggtgccacctggtggggtggacgtctctcagactgcccttctgacaagcaggggtgggcgccaggcaggctgggtcaggccctcaggggtccctggagccctgggagggagggactgggtcgtgggaggtcctggtagctcccggcacccaacctcgcttcccgtgtgggccccgtgttgcttttctgctgagaggggcttgggcctcggttctccctgtggcagcggcattggtgcctgggttcttaaccctctggacccagcagctaggagcttctggaacccacgaggacatctgccactggcatggtctactcactgatggggtcctcctgactccagggcagagacgtccgtgcgggaactgaccgaggcgtggccccaggccccggcatcctcccctcgctgcacgtggtcacttccgaagcagcgctccctgtggccgcagagacagagcccgcaccctggctgtctgtggtgcctgggccccagctcccgcccgccacccgccctgttgagtgcggcctccagactcgagtccagaatctgtttctgtcaagtcagtcgtccccagctgcacacggggactgctgagcgctgcgctctcacgggtctgttccggacagagggtggcaggggtgagccctgatcccttacaaaaaataccagcttcccagggagtaatggcgccttcactgaagccattttgtacatggggacggggtggggacgtctcttttttggtgttggacgtttgaccagtggggaggggttcagaggcggcggtcctgtccttggctccgtctgtccgtgtggccttgctgccattccgtctgatcattaaacacagcttttgatacatatggcccggcctctgcctccgcagtgcacggcttggggcatctgctctgtgcaggtcccggtgagcagaactgagagctggcaggccgcctggctgtcctgcagaggacggattggaattgccaccgcagggccggccagtgctgtgaggtgcccagcgtcactcccatgggctctgtgggccatgtggtccctgtcacgcttctcagctctgccactgttgctggaaagcatcacagaccatgtgtaaaatgggccaaaataccttttacaaaattaaaatagagatggggtcttgcagtgttgctgaggctgatctcgaactgctgagctcagacaatcctcctgtctcggcctcccaaagcgctgcaattacaggcacgagccaccacgcccatccctcaagtaattttctcgccagaccctgaaattggaattgtatagcatcctcacgtctcaaaagagtttattattatttttttctctttaaaaatgcaaagacctgtcttagccgctttgggacaaggtttggtttccagctgctgctggctggcgctgggcctgtgggcacgtgggtgatggatgcgggtttgtgtgcgggccgagaggccagtgagtcctgagcatctgccaggcatcaggggctgctgtgtgtgttgttctagtctcacaaagttctccgctacgttagagaaagtgagacccaggctgggcatggtggctcacgcctgtaaccccagtgctttgggaggctgaggtgggaggattgcttgagcctgggagtttaagaccagcctgggcaacgtagcaagaccccatttctacacaaattacctgggtgtggtggcacacacctgtagtcccagctgttcaggaggctggggtgggagaattacttgagcccaggaggtcaaggctgcagtgaactgtgatcgcaccactgcactccagcctgggtaacagagcgagaccttgtctccaaaaaaaaaaaaggccaccagcaagcctctgaggccacatggctgtgagggatcagagacatggattcctccaggccctgagccaaaccacgactgcctggcagcgtgacgcccttggccttaatgtggaacagggtgaggacgcagcgggagatggaggctcaggccttaccactcacagcaaacctgaattcaaacccactggggaagggacggcttaatcacggaaagcgaattccagaatacttgaagtcacacttaggtttcggttttttaacttgagcagttcctcgatacgctccagaaggagcacccccaattgcctttccacgggggagctcactgctcggaggccactcggcgctggctctgaacacctcccctgtgtgcctctagtggtgatttgtcctgtccaggaaaagaaaaagtcgctatgtcattagctccggtggacctgagcctcagggctgaaagttacagtcaggactcagcgcacagagccctgggctcacaccacgtccacctgtgaccacctgcggtcgtgggcaagtccctctgcctccaactccctgtcctctggaaagagggttagtaatgtacctactgcaaggcacgacagccaggatgtcaccaaatcagccatctgattggacgcttagaagcagtcgggacttttgtgctagtgacacacttgattcaggaagacgggctcctgccaggctcagccggtgcctgagctccggggggtgtgcacacctcgactgtccaggtcacacacggtccagggatgtcagggagaggtagagctggggaaatggaaacaggctgcttgttggcactggggagggtattttgtttcttttcgtggggagcatccctctgtcttgcagtttaagttacaaagtggagcaatatggtaacaatagtgattttctttcactaagctgaccagagcttacacattttttatccacccacctatccatccatttatccaactggccatccacccatccatccatccacccacccacccatttatgtaaccatccatccatccgtccgtccgtctgtccatccatccatccgtccatgcatccatccacccacccacccacccatttatgcaaccatctgtccacacatttatccatctgttcatccacacacccacccattcacccacctgtctgttcagttatccatccgtccatacacataccctccatccactcatttatccaaccatctatccacacacccatccacccatttatccacccattcatccacccattcacctatccacccactcatccatttatctacccatccatccactcattcatctatccacccatccatttatccaacatccatccacacacccatccatctatccgtccatccacccgcccacccacccacccatccacacacctatccatttatccaaccatccatccacctatccacatacccatccacccagttatccaaccacccatccacttatccacatatccatccatccagccacccatccacacacccatccacctacttatccacccatccgtctccatccattgatccaccatccatttgtccatccatttacccattcacacatctattcatccatccatccatccatccatccatccatccatccatccatccatccatctacacacccaaccatccactcacccacacacccacccatccacacacccattcatccatctatccatccatccatccatccatccatccatccatccatccattcatccatccattcaaccacccactcacccatctatccacccatccacccatctacccattcattcatccacccacccacccatttatccatccatccacctatccacccacccaccaatccatccatccatctacctgcccatctagccattcatccatctacccacccctccactcatccatccatttgcccatccatccacccattatttacccctccacccatccatccatctgcccacccacccatccatccatctacccacccacccatccatccatttgcccttccattcaaccatccatccacccaccttccacccacccacccactcatccatttacccatctatccacctgtctactcacccacccatccatccatccatccacccatccactcatccattcatccacccactcacccacccatccacacacacacccatctatccatttatccacacacacacccatctatccatttatccacacacacacccatctatccattcacccatttaccgtccgtctgtccatccatccatccatccctccatccacccaaccacccatccacccatccacacacactcatccacccaccactcttcactgctgtgtgccaggtcctctactaagcaccccgtctggcccaggcagagagctgctatagctgcacgaggaaccgggactcagtgtttggggccaggtgggaagtcatcagaaggtgagagggtggagttctggaaagagtccaccaatggccctgaggaagagaggagggggttcccatggggtcacaggctcttctccacacggctcagagcaggttagaaatgcctcttgggaaccaaccgcagcctgcagcctgacaggagggtgggcagaagaatgcagcaataggaggccctgggtgtggagccccagcttgaatcccaggagctggatgactggctctcagggctgtagccacttcttctgcttaaaaggaggtgacagctacttttgtgaggccatcatgagaacctaggggagtccctgccgagtgccgggcacacagcacatactcagtagactggaccattctgcgggcgactggggaaacgtggacccaggagctggatcctccaggactgctctccctccagcaccaggcgtggctccccgggacttgcggcacttctcaaaagcaaatcaccaacaaagacgctctgccaaaggtaataaaatggggctggtctctaaaggcagttccaaaaaaaatttccgcaaagtctcttgagataagagaggagacagtggttctaacgaagtgcaccgtctccttcgacggcacggaggaacgtgaacaacctggtgacctaagcaggaggggcggccagcgtggcagcgggtggcgcgtcaaaactgaggccacccagtctgaccatgagggagaaaagcaccagacaaacccacttgaggcgtgtcctgcaaaacacctgacctgccttccccaggagcgggcagggtgtcagaaataggaatgtctgggaaactgcgacagcccagagagatccgaggaggcgtgacgcctaaatgccacgtgggatctcgggtggggccctgagcaggaaagggcattgggggaaactgaggaaactggaatcaagtgtggacttcacagtcgtgcatcaatagttgttcattggttgtgacaaatgtatcacactggcctggatgccagtaacaggggacccgggatgtggcgcacaggggagttctgaactgtctttgcacattttgtgggaatctaaaactcttctaaaacgtttaggctgggcacgttgctgactcctgtaatcccagcgctttgggaggtcgaggtgggaggatggcttgagcccaggagttcgagaccagcctgggcaacatggcaagaccccatctctatttttttaaaaaattaaaaatttatattaaaaatactgtagttccttcccgggcaacatggtgagacccccatctctactaaaaatacaaaaattagcctggtgtggtggcaggcggctgtagtctcagctactccagactctgaggtgggaggatcacctgagcccgggaggtcaaggctgcagtgagctaagatcgcgccactgcaatccagcctgggcgacagagaatgagaccctgtctcaaaacacacacacacacacacacacacacacacacacaaaatggttacaccagtgccctagaaaacgccctcagcacctcgcccccagggctgtcctgggcacacccctccctgcgccctgtcctgagtcacctgcccaggtgggcccacctgcccacagcgcccactctgcgggcaacccccaccccatggctcccagctgcgaagcccactcccatccctggctacccccaacccctccccatctccatcgtcttccactctgggttggctcccgccagggttgggaatccagggtggaggtggcagagccctgggacccctgtcctccggagactccaagcctgggcggcacccccggcccggagcaggaggtactggggaaggggcttggcagggggccgggggaggggcggctcccccacccggccccgccccgcccctcccttcctccagccccgggcccagctccggcttctgctccacttcggggtgggcgggatccgggcagtagcggtgcagcctcgtcgtccggagcgcggtgagtcggggtctcctgcgggctcagcctcccctcggaacagcccccacttcctccaaccccggtgagtcggggtctcctgcgggctcagcctcccctcggaacagcccccacttcctccaaccccattcgccaagccccggggctgtttggttgcctctggggctgtgtagaggtggcgtggcgggagtgtgtagatgcagccaggctgtgtagacaccaccggggttgtggagaggcagccggggctgtgtggacgccactggggtgtgtagacatggccaggttgtgtagatgcggccagggttgtgtggactcaggtgccgcgtgtagatgtggccggggttgtgtggacgcaggtgcggcgtgtagatgcggcaggggttgtgtggacgcaggtgtggtgtgtagatgcggcgggggttatgtggacgcaggtgtggcgtgtggatgcggccggggttgtgtggactcaggtgtggtgtgtagatgcacgtagggttgtgtggacgcagccgggattgtgtggatgtatctagcgtgtgtagatgtggctgagatttctagacgaggccaggctgggtagatgccgccagggtgtgtggacgtagccgggattgtgtggatgcagctgagatgtgtagatacagctggggtgtgtagattcggcctagttcctggaggggcctgggaccgccgaagccctccccatccctgttcccacccagagtcctcccttcttttctacccgtgaacttcacctaaagcaagaaccaagcatcagcctggagccctctggggtcaggggtggcgggaaaggggctgacagctactgggatggggtgcagggctggggtgggaggtgagtctggggtgtggtgcggggctggggtgggaggctggggtgggaggtggggctggggtgggaggctggggtgggaggtggggctggggtagggtgcagggttgggatggggtggggtgctgggatgggttggtggggtgcagggctgggatgggttggtggggtggggtgcggggctgggatggggtgggaggtgagtctggggtgggagggggggctggggtgggaggcggggctggagtgggtgccaggcatctgactggagcctctcctcccgccccagttctcaccctcggagccgcttctgagtaaacacacactgggatgtaacaattggaggtgggtgaagggcctgagatggggtgggttgttggtatttgcctgagggagggtcctcctggattcaattagccccggcaggaaacccaggctggggaccgtggcgttatccccgcatgaccgggaatgacccacattctgggaattagggcggggtccccaggacaggcgtccgtgctcgagggtcctctgtggcccagggaccttcgacttccttccgtcattttatagggggtcaaaccaggcctcggacccaggcatgggctccagaggttgccagaggttttggggacttgccaaagggttcaggcactgccccgcaggactgcatggccggaaacaccttgtgggccgcgtggtggccaccgccttgcagatcagggatgccccgcaggacacctgtggtcctggcttcctgacgccttcctgggggcctggctgggtggggctgtgtgagattctgggtgagttgtctgtgtggctgtgtgtgattgtgtgtgatcatgtgattgtgtgtgatgtgtggttgtgtgtggcaatatatataattgtgtctgtagctgcatatggccatgtgatttgtgtgtgattgtgtattatatgtgtgtgtggggtcatgagtgatcgtttatgttgtgtaattgtgtgattgtgtatggttgtgtgtggtcatgtgtcatgtcatgcgtgattgtgtatggttgtgtaattgtgtggtcgggtgggatcgtatatggttgtgtgtcgatggctgtataactgtgtgtatagttgtgtggtcatgtgtggttgcgtatagttatgtcatgatgtttgtgtgattgtataggattgtgtgtggttgtgcgagattgtgtgactgtgcagccatgtgtgtcattgtgcctgtgattgtggtggaggtgtaattgtgtgtatgggtgtgtgactgcatgtgtgagaccgtgtatggttgtgtgttgtatgggaggtttctgcagctgtgtggttatagtgtacggttgtgtgtgtgattgcatgatgagaattgcatgattttgtggatggctttgtgtggttgtgtatggttgtataattgtgtttgtgtgtgattgcatatgattgtggcaatatgtgtaatcgtgtctgtatgactgtgtatggtggagttgtgattgtatcagtgtatgactatatgtgtgaagttgtgtttagctgtatggtcattgtatgtgagatttgtggagttgtaacgtggttgtgtgtgtacttgcatgatgagattgtgtataatttgtggatggtggagtgaggttgtgtgtggttgtatgtggttgtgtgaggtgtgttttgtgagggtgtgtgtggttgtggtgtgtggttgtgtgaggttgtaatgtgtggttgtgtttggttgtgtgaggttgtgtgtggtaatgtgttgtgtgtggttgtgtgttgtgtgtgtgttgtgtgaggttgtggttgtgtgtgcaaatcccctcttcctagtcttctcatctggggcatggggatcagggtcccagcgctcaggctggcctgaccgtggggtaattgggccctgcagagcctcacgccgcctgcttgtcctgccacgcggaatgggagtccgtgtgtgccccgctgcccacagcgtgtgaacgtgagttggggaccatgtggcccactgcgcgctgggtcccgtccctaaagagcattcttggactgtctaaaattccctttgcagaatttggaatgtttagggtgtaaaatacggagcttggagagtccttaggcaaaaggtgttggtggccggttgcccaggctggggactctgtccgcggggcgagagcttgcaggaacgctggagcatcggagttcaaaccctgttgtcactgtggttggttaagggctttgcggagacgtggaggcatggtagatggatcgcaggtgagggcggaatgaaggcaaaggcgtcccttctctgatggcagacacatgggtggagatttgaggtaggagcagttgtgggggggtggggggacaggcgagagtgtgggagggagtgaggtcgcgtgattccccgtgcatctgtgcgtgcaactgtgggtgatggagctggtgcttggggaggcaggactggaccctgggtgccgacactggggcagggtttagagctcccggccctgcgcccctcggtcccccaggctcacctggcttagctggggagcagggttctcggggagcataacagggaagctgcccagcaatgtggaggagtcactagaattccaagaactctgtgtgtgagtgtgtgtgtgtgtgcgtgcgcgcgtgtgtgtgtgagagagagagagagagtgagagtgggagggagggagggagggagaggcagagagagccttaatctcctcctctgtaaatgggcatgctgatattagctggacctgtctcctgtataccctgggattattgggagggctggatcaactctcataagcctatgagccctacaccaacaggacgctgttggtataagcacatctcagcctcccggtagtcctgtagacccagcacctgtagtcccagctactcaggaggctgagatgggaggatcgcttgagcccgggagttggaggctgcagtgaactgtgatcacaccactgcactccagcctgggtgacggagtgagaccctgtctcaaataaataagtgaatgaatgaatgaatgaatgaatgaaagacgcataaatagaagaaatttagaagcccaagaatgaagctgaggcgaaccttggggttttattgaagttgatggttgacgcagccctgcaggctgttctaagccattgatgtttctgtgtgttgctctgaaatggatgcagaggataacatattctgggtgatccactcataactgcataaggcttcctttgttgttgttgttttgcagagatgggatctcactatgttgatcaggctggtcttgaattcctgggctcaaggaatcctcccaccttggcctcccaaagtgctgagattacaggcgggagccacggcacccagccctttgttgttttgtttacactttacctttatgaaaaaaaaaattgggggggataattttagttgtgaagatggtgcagagagtccccgcacacccaccttccacccagtgtccccttgcgttgacacctttgaccacagaacaaagagcaaaactgggccgggaacggtggctcacgcctgtaatcccagcactttgggaggctgaggcgggccgatcatgaggtcaggagatcgagaccatcctggctaacacgctgaaaccccatctctactaaaaatacaaaaaaaattagccgggcctggtggcgggcgcctgtaatctcgggaggctgaagcaggagaatggcgtgaacccgggaggcagagcttgcagtgagccaggatcgcgccactgcactccagcctgggcgacggagcgagactccatctcaaaaaaaaaaaaaagagcaaaactgacgcacgactgtgggtgccacactctgtcttcccaccaatatttctgttctacgttgcaatccaggatcccacattgcatttaggagctgtattaattttaaatgatacaactcataagtgattggaaggttattttttaatctctgcgttttcctctgggtcccttagtatcactcatgtttatcggcgtcttccctcccacacgattactgactcctttctcctctgtccacattataaagctaaaagaacacaagataccattgctgcaaatagttttctcacaaacacctcttcccatgaaagcctaacaaaaagaccatagacaaaatgaaaaaaaaaaggagaccaagcttattaaatttcctgtaggcttgctgagtgatttatttcatgatgttggggcgatggaggaggggaggatttcctgactagattcaggcctgaggacaggggacaggaagaaataagagaggccatggcgtagacaacagctgtctgttctataaacgggctttggctgccgtgggaccaaagatgcggaatcgaatgggatggacgtgtccgaaaactgtgatcatcttggattaggtgaaggaaaaaacaaacaaacaaacaaaaaaaacaaaaaaactacacagacaggtgggcaagacagctaaagagcccagaccgaggctgggggcatgatggtgcaggcttgtagtcccagctatttgggaggctgaggcaggaggatcacttgagcacaggaagttgagaccagctgggcaacatagcaagaccccatctgtacaaaaactaaaaaaatgagccaggcatggtggtgtgcacccatagccccaactatttaggaagctgaggtgggaggattgcttcaacccaggagttggaggctgcagtgagctgtgataacaccactgcactccagcctgggtgatagagtgagattctgtctcaaaataaataaataaataattttaaaaaagagatggagaaagagaagagaagaaatttagaagctcaagaatgaagctgaggtgaacctttgggttttattgaaactgcttggaaaaaaagggaaccccctgaatttctccttggagaggttgaaccatggttttgagcaactagaaaacattggccattaaaagcagagagtgagaccctgtctctaccaaaaatttaaaaaattagccgggtgtggtggtgcacacctgtagtcctagctactcaggcggccgaggtgggaggattgcttgagtccaggaggttgaggcttcagtgagctgtgatagcatcagtgcactccagcctgggtgacagagtgaaaccctatctcaaaaaccaaaaaagtaaataaggaacaccagacagaagagccctgggacctgccgtcctgtgtattagtttttggttactgcataacaaatgtctctcaaatttagccaattaaaacaacagacatttattctgtcacagtttctgtgggccaaggatttgggagtgatttatctgggtggttctggcccatggtctctcatgaggttgcagttaagacatgggccaggggctgggtgcggtggctcacgcctgtaatcccagcactttgggaggctgaggagggcagatcacaaggtcaggagatcaagaccatcctggctaacacgatgaaaccccacctctactaaaaatacaaaaaattagccgggcgtggtggcgggcacctgtagtcccagctactcaggaggcggaggcaggagaatggcgtgaacccaggaggtggagcttgcagtgagccaagattgcgccactgcactccagcctgggcgacagagcgagactccatttcaaaaaaaaaaaaaaaaaaaagacatgggccagggctgcctcatctgaaagctcgtctgggcctggaagagccacttcaaagctggtgtcctcatgtggctgttggtgggaggcctcagttcctcaccacatgggaatcaccatagtgctgctcgagcatcctgacaacatggctgcttgcttcccccagggctggtgattcaagggagagaaagaacaaagccatagtgcttctatgatctaacctcagaagcctagatccattgcttctggtatattctattcattacaagtgagtcaataagtccaacacacactcggagagggaaattaggctctgctaggtgaggatagcaaataatttttggagatatttaaaaaccaccacatctataaccttgggcaagttacctaactcttcggtgcctccaattcatctttggtcagaatagaaccagtctcataggagaaatgtggcaataaatgagatgatgactgtaaatattgtttaatacaacacctgtcacatagaaaatgcttatgtacttttttttttcaagatggagtcttgctccattgcccaggctggagtgcagtggtggaaacttggctccctgcaacctctgcctcctgggttcaagtgattctcctgcctcagcctcccaagtagctgggattacaggtgtgcaccaccatgactggctaattttttttttttttttttttgagagggagtcttgctccgtcgcccaggctagaattcagtggcacgatctcagctcactgcaagttctgcctcccgggttgacaccattctcctgcctcagcctcccaagtagctgggactacagtcacctgccaccatgcctggctaattttttgtatttttagtagagatggggtttcactgtgttagccaggctggtcttgaactcttgacctcaggtgatccacccaccttggcctcccaaagtgctgggattacaggcatgagccactgcacccagcccatgactggctaatttttgtatttttagtagagacagggttttaccatgttggccaggctggtctcgaactctggatctcaagtgatccacctgcctcagcttcccaaaatgttgggattataggcatgagccaccatgcctggctttatccacttacttttattaaaggtatatttttcagtgttacagctcttgaggaatgatgtgccagctatagttatcaaattgtaactctctggatttgtggggccggagaggcagagggaaataacttgctctttcaggaggcattaggctacggaacggagagactgcacatggcggctgcgtttttcctggctccccttttccaatggttaagggaagacaaatgggaattaagcagttccaggctctgcatgtggcagaaaccatcctaccatctactcccatgggtgcagtttgcaaaatttgagagaccaaaaaaaaaaaaaaagcagagaatgtgaagggcacattagggtatagctgaggatgtcaggcaggagacacagcctgtgcctttgaaggcactgaggctggaccatgctgtgcatgtttggggatcggcgaggaggccagtgaagctggggctgaaggagggaggggttggagatgaggacagttagacccggtcgctgtggggaggtttgggcagaggtgggatgtcacctgacgcgggtcttagctgtctccctgaggcttcccgttgagaatagacccagggaggggaagatggaagtggcattttgtgagcctgggcgatgccctgcttagaccaggctagacatggcgtaggggcccaattctagagctaccctgcagacggtctgacaacgtttttggatggactgggtttgggatgtgccagggcatcaaggataaacccagtttttttttttttttttttttttttttaaagacagagtctcactctgtcgcccaggctggagcacagtggcgcaatctcagctcactgcaacctccgcctcctgggctcaagcaattctcctgcctcagcctcctgagtagctgggattacaggtgtacgccaccatgcccggctaattcttttttttttttttgagacagagttttgctctcattgtccaggctgtagtgcaaaggtgtgatctcggctcactgtaacctccacctcccgggttcaagtgattctcctgcctcagcctccagagtaactgggattacaggcgcccaccaccacacccagctaattttgtatttttagtacagatggggtttcaccatgttggccatgctggtctcaaactcctgacttcaggtgatccacccatctcccaaagtgatgggattacaggcgtgagccactgtgcccggccaaacccaggttttaaaaaaaatttttttgtacctgggtgagtacgaaagtggagctgctgtctgagctgagaagactgtgggaggagcaggcatttttgtgaagaggagactgaggagggatatgagagctcagtttggtcagtgtcaaatttaagaagcctgttaatgattgtattagcttttgtttgtttaagacagggtcttgctctgtcaccctcacccaggctgcagtgtagtggcttgatcgcagctcactgcagcctcaacctcctgggctcaagtgatcttcctgcctcagcctcccaagtagctgggactacaggtgtgtgctaccaccctggctaatttgtaattttttttttttttttttttttttagagatgggatctcattatgttgcctacactgatctcaaagtcctgggctcaagcgatcctcctgccacagcctccaaaagtgctgggattacagacctgagccactgcacctggcctagttttctgcaaattaccacaaatgtagcaacttgaaacacctcctgtttactgtctcatggttttgtggtttctgtgggttgggtggctgggcatggtttggctggatcctctgctcagggtctgacaagactgcagtcagagtgttggctgggctgtggtctcatcagaaactcaactggggatgcccaaatgcagtggctcatgcctgtaatcccagcactttgggaggccaaggctggcaggtcacttgaggtcaggagttcaagaccagcctgggcaatatagcgaaaccccttctctactgaaaatacaaaaattagccgggcatgatggcgggcaccagtgtaatcccagctacttgggaggctgaggcaggaaatcacgtgaacccaggaggcagagattgcattgagctgatattgtgccactgcactctagcctgggtgacaagagacttcatttcaaaaaaatatatacacatcctggctaacacggtgaaaccctgtctctactaaaaataacaaaaaaattagccaggcacagtggcgggagcctgtagtcccagatactcaggaggctgaggcaggagaatggtgtgaacctgggaggtggagcttgcagtgagccaagatcacgccactgcactccagcctgggtgatagagtgagactctgtctcaaaaaaaaaaaaaaaaaaaaagtgggtaggttggccagatgtcccaggttgcaggctacaccatgcctggctcattatttttattttttgtggagatgggggtctcgctatgttcctcaggctggtctcaacccctggcctcaagtgatcctccctccttggcctcccaaggtgctgggattacaggcgtgagccaccacgcccagccagaaacttgggtttaaaatggactttgcattataatgagatgggtaattcacccaggatgaatccagccttcagcttttgctttcttttgcttttgctttctctctctgtctctctttatatatatattgcccagactggacaacattgcaagacctcgtctctacaaaaacttaaaaaaaaaattaacccagcgtggtggcatgcatttgtagtcccatctactcgggaggctgaggcaggaggatcccttgagcccaagagttcaaggctgcagtgagccgagatcataacactgtacttcagcctgggtgacagagccagaccctatctcaaaaagaaaaaaatgcatgacaatattatgtatcttgatgaccgaggtttttggaactcactttaatttttctcccagggccaatacctacctcctgtcaccctactccctggccccggatgtcctctgcgaaggctctgagcccacagctcactcctgtttgaaaacagacactggcaggtctcagagtggcattaaggacacgctggccctaaaccaagactctccccagctggcctcatctggaggctggaaacagacattgctattgcctcgttcacagtcgctcactcgttcacagtcactcgtggctctgctaacaaagtccttgcctagtccctccttgggggcccccacacggctccagatggttcctgacagatgaagacggaagtcggtaggttggccagatgtcccaggttccaggttaaaactggaatagctgccgggcgcagcggctcacgcctgtaatcccagcactttgggaggctgaggcaggcggattgcctgagttcaggtgtttgtgactaccctgggtgacacagcaaaaccctgtctctactaaaatacaaaagaaaaaaaaaatttagctggatgtggtgacgggcacctataatctccgctacctgggaggctgaggcaggagaatcggttgaacccaggaggtggaggttgcagcgagccaacatcgtgccactgcactccagcctggcgacagagcaagactccgtctcaaaaacaacaaaaccaagaaaaaaaaaaaacaaaactagaatagccttgagcaaaccagggccaggacaactggtcaccccaaagcaaactgactcactgggtgacagggactctcaccccatcaccaccgcgttgggatgagtcggacttcctgcctcccgcctgggccagaggatgccgagagagtggcgtctgttgggctggaggctggtcgagccacaggctcaatttggagacatcaatgctgatggttcatgattttggtgcgatctcggctcactgcaacctccgtctcccgggttcaagctgggattataggcgcccgccaccatgcccggctaaattttatatttttagtagatgggggccaggctggtctcaaactcttgacctcaagtgatccgcctgccttgacctcccaaagtctgggattacaggcgtgagccactgtgcctggccccttcttttttcttccctgtatcttggtgcgcagttcagatctgagatcccacgtccattcttctcgaagctttttcctgtcacgcaggcgggcgagtctcctcctactgatctctttggttttacagctacacacttttctttttggtttgcctgggggcattctcacatatctctcaaacccggccagtaacaccctcctacgttgctttaaaaaaaaaataaatgatgcctcttcttgtcaagggcttcctcccacctcaaggtcacctgtcaacctccatgcccactcttgtttctcgaaatgggctatcttccctccttctacctgtgtatttcattctctcccacccccagtctttggaaaaaaagataataaaactctagaagatatttttactctgagattagcagtgtgaaggaccttccagaaccttctctctctgcctttctctgaattaaaacgctcgcttgtctgagaccggctgtctccattgcatctgagtgataagagaaagattcattgaaacaggcaggttttatttttggtctgtccagcactaaatgattttcttttggctgacttatttttttttaactctaaacagactttgcagcttagtaagaatttatttcaatttagaaatatgggtgttctaaactttttttaaattaaaaaaatttattttttcctgagacaaagtcttgctctatcacccatgctggagtgcagtggcacaatcatagttcacttcagccttgacctcgtggggacaagtgatcttcctgcctcagcctccaaagtagctggaaccacaggcgtgcaccaccacccctggctaattatttttattttttgtggagatgggggtctcgccatgttgctcaggctggtctcaacccctggcctcaagtgatcctccctccttggcctcccaaggtgctgggattacaggcatgagccactgcgcccagccagaaacttgggtttaaaatggactttgcattataatgagatgggtaattcacccaggatgaatccagccttcagcttttgctttctttttttatttttatatatttattgatttttgagacacagtctcactctgtcgcccaggccggagtgcaatggagcaatctgggctcacttcaacctctgcctcccgggttcaagtgattctcatgcctcagcctcccaagtagctgggattacaggcacgccaccacacttggctaattttttgtatttttagtagagatagggttttgtgatgttggccaggctggtctcaaacgcctggcctcaagggatcctcccactttggcctcccaaagtgctgggattacaggcgtgtaccaccatgcccagctaatttttgcatttttagtagagacggggtttcgccgtgttggccagggtggtctcgaactcctgacctcaggtgatccacccacctcggcctcccaaagtgctgggattacaggcatgcaccaccatgcccagctaatattcgtatttttagtagagacggggtttcgccatgttggccaggctggtctcgaactcctggcctcaagcgatccacccgcctcagcctcttaaggcgctgggattacaggcatgagccacagtgcccggccaacttttgctttctttgccgtacacgtggcctagggaggttgcagcttggaggttttcagccaactttttgcgaaactaatacacaccatgctgatttattctttaggaaacttgtcagcttttcactgaagcaacaaatgcttttgtctgtaccaactatttgcaaagtgctttacagggagatctgagcaaggcagagaggtaaagaaggctcgtgtctatccttgaggagttgagaggagtctagaagtttctgtacattgggcaaatctgggcagtgctttataacattttcccgagctacagagctctgacccctccgcggcttcactgcttttcaagctattacatcagcaccaaagattcctttttcttgtattcacggtgacaaggagaggctcaaagtcctgcctgtccattaatttcatgctgatttctctcaacaatctttttttttttttttttttttttttttttttttttttaaagaggtagggcgcggtggctcacgcctgtaatccccgcactttgggaggccgaggccggtggatcacctgaggtcaggagttcgagaccaccctgaccaatatggtgaaaccccgtctctactaaaaaatacaaaaattagctgggtgtggtggtgggcgcctgtagtcccagctacttgggagactgaggctagaggattgcttgaacctgggaggcggaggttgcagtgagccgagatcgcgccactgcactccagcctggagacagagcgagactccgtctcaaaaaaagaaaaaaaagaaaacaaaaacacccctcaaaaacagggtctttgtttgagaccctgttggaggcctctgcgttgctctggttgtctctggggagcccctaaccaggcttggaagaggttcttggaggaaggtttctcctctgaccaccggctggctctggccccttacccacgagcctctgtggccttggtgaggtgggcgccgagtgcatacggtggataagcctgatgttgtgttgattgtattgtgttcttctccagacagcagcaaaggaggggaagagcgtttcctttagggaccatccctgtagaagttcctgctctccgcttcggtttgttcacaaactacatatcctggcaccagggggcacagaacttggctccacgacgaaacaggtcccgtggaggagctggtgctgggcggggctgcgcctgactcactctggtgtctgctgaggtccttccctggtggagactcctgcctccaactctatccccttttggtctcttcctccacggcactgacctcatcctttccttctgttggccaccaagatggaggccaatggccccacgtctacacgtggcagtttaggagccccactgggaagaaggcgtctccgtccctgcttctgtgagttgaaccataagaaactgatcttgttctatagactttggtcttaaaaagtgacagttttataaagttgaaactcaaggatccaaaagaacttggtgtcctgcttgggtcatatgcaacctcttgggtccatcactgatggggatggaggggtgggccctgtgattgctaggtcagggtctagtgtggaccaatcactgatggggatggaggggtaggcactgtgattgccaggtcagggtccagtgcggaccaatcactgatgggggatggaggggtgggaactgtgattggcaggccagggtccagtgtggaccaatcactgatggggatggaggggtgggaactgtgattggcaggccagggtccagtgtggaccaatcactggctggagatggaagggtggaagctgtgattggcaggcttgtgttcagtatggaccaatcatcactgatggggagagggagtaaacactgtgattggcagacctggtggctagcaccatgatcgaccaccccaccaggacagcagggatgaggtggaccttcattgaagaaagggatgctgggcagacaaaaaacacataccctagaaaattacaactgaagggacaaagcagatcaacgacctggggaaactgaggcctggagaatttcattgccttgctgggactcctggaagtctcaggatgagtgaggatctggatattatgagttgggcagctcccatttgcagggtgttcctcctgtaaagatgccagatgcccagtaaaccattcggctctctccgaagtcagcatcgagtagcattgtccccagggagcgtgtgttggcttcctggtgctgctggaacaagatgggcctccctgggccaaagtcaaggtgtgggcagggctggtccctcctgggggctccaggcgagaatgtgttcccgcctttcccagcgtctagaggcacccacatcccttgctcggggccccttcctctcccttcacagccacagcgcagcacagcctcttccagtctccctgaccctcaccctcccacctcctctcatgagaacactgtggggatatgaggcccgccagatcatcaggattatctcccatctccatgcccttcactcagtcccacttgcagagtcgctttggccatggaaggcaccacatttacagattctggggattaggacctggatgtcagagttattattctgtggccacaggaccgacctgagatgtcatttcttttttttttctttttgagatagagtcttgttctgttgcccaggctgaagtgcagtggcacgaccttggctcactgcaacctctgcctcccaggttcaagcgattcttctgcctcagcctctcgagtagctgggattacaggcatgtgcccccacgcccggctaatttttgtatttttagtagagatggggtttcaccatgttggccaggctgatctcaaactgacctcaaatgatccgctctccttggcctcccaaagtgctgggattacaggcatgagtcgctgtgtccagccccaagatgcatttctaggaacgtacccagagacactgtcagattctctgtaccaaggagtcaaggctctttctgacctttgcttggttcaaaggaagattctgccgcctgatttctgcctgctctccacccggcctgccagctgccaggatgcaatttctctggcctccaaggaaggccaggcagggtcgcgccggggcagaggcacaccagcgcgtgtctggcccagtgtgcccagaacccgagaaactggagtggccacgggtgggcggctccctcacgctggcttctcctgagtccctttctgttcacagatccccactcctggctatccgcatgctggtcatttctgcttggagacagttcaggtgtgtcccacagttgctgtccctggggctcttggctctattgttaatggccaccggctgtgacggctcacatttcagtcctgcatatgtcagttcctcgtactttctttctttttttactgtatgtatgtatgtatgtatgtatgtatgtatgtatgtatgtatgtatatatgtatgtatgtatgtatgtatttgagatggggtctcactgtgttgcccaggctggtctcaacatcatgggctcaagcagtccttctgcctcagcctcccaaagtgctggtattacaggcatgagccaccacacctggtcttcctttctttccttctcccctcccctctcccctctcccctctcctctctcccccccacccctctccccttccccctcccctcaccttcccttcccctctcccctctcccctcccctctcccctctctcccctctcctctcccctctctcccctctcctccccctcccctacccctaccccttcccctacccccctgccctcccctctcccctcccctctcccctccccctccctctctcccttccttccttctttccttccttccttccttctctctctctctctttatttttttctgagacaaggtctcactgtcacccaggctggagtgcagtggtgtgatcataactcactgcagcctcgaccttccaggctcaagtgatcctcctgcctcagcctcctgagtggctgggactacagatatgtgccactatgcctggctaatttttacaatttttttgcagagacagggtctccctctgccacccaggctggcacagtcatagctcactgcagcttcgatctcctgggctcgagtgatgaaccctcccacctcagcctcctgagtagctgagactactggcatgcaccaccatgaaaggtcaatttttaaattttacatttcgtagagatggggtctcactatgttgcccaggctggtctcaaactcctggcctcaagcaattctcttgccttggtttcccaaagtgttggaatgacaggcatgagctgccacacctgaccccccttttccttataaatcacccagtctcaggtatttctttacagcaggacaaaaatagactcagacaactgtgtttaggcattacttatagggtgacaactgtcctggtttgattggaattgagtggtttcctgagacatgagactttcagtgctgaacagggacagtcctgggcaaactgggaccattggtccctgtaagtgttgacgggacactgtgtcagtctgttctcatgctgctaatgaaagcatacccaaggctgggtgcagtggctcatgcctgtaatcccagcactttgggaggccaaggtgagtggatcacaagcccaggagttcaagaccagcctggccaatatggtgaaaccccatctctactaaaaatacaaaaattagccaggcatggtggtgcacacctgtagtcccagctacttgggaggctgaggcagaagaattgcttgaacctgggaggcagaggttgcagtgagccaagattgtgccactgcactccagcctgggggacagagcgagactccgtctaaaaacaaaacctacctgagactaggtaatttataaaagaaaaagagttttaattgactcacagttcagcatggctggggaggcctcaggaaacttacaatcatggcggaaggaggagcaaacatgtccttcttcacatggcggtaggagagagaagaatgaaagcccaacaaaggggaagccccttataaaaccataagatcttgtgagaactcactattatgagaacaggatgggggaaagcatccccatgatttaatgatctccacctagtccctcccatgacacatggggattatgagaactacaattgaagatgagatttgggtggggacacagccaaaccatattagatacctggagggagaagtcaagaatgtaggtggcaaaactttctaaatgtgcttgatgtggaacagctctccagcaacgtgtgtcctaagacaaagcctgagcttctttctcttttttttttttttttttttttgagacagagtcttgctctgtcgcccaggctggagtgcagtggcacaatctcagctcactgcaagctccacctcccaggttcatgccattctcctgcctcagcctcccgagtagctgggactacaggtgcccgccaccacgcctggctaattttttgtatttttagtagagatggggtttcactgtgttagccaggatagtctcaatctcctgacctcgtgttctgcccgcctcggcctcccaaagtgctgggattacaggcatgagccaccgtgcccagcaagcctgagcttctgagtgtggtgcacagcagccttccagatggggctgttgggccttcctgcctcacctctcacagttctcctaccccaccccacactaggccctgacattccctaaactaactttctttctctttctttctttctttctttctttctttctttctttctttctttctttctttctttctttctctttttctttctttccttccttccttcctctctcccttcctctttttctctttctctctctctctctctctcattctctcttttctctctttctttctctctttctttcttttctcttgcccatctcaagtgcagtggcacaatcacacctcactgtagtctcgacctccttggctcactgatcctcagcctcaagagtagctgggactacaggtgcatgctaccatgcccagctactttttctattttttatagagatggggtcttattatgttgcccaagctggtctcgacctcccatagtgctcagcctcccatagtgcctcagcctcccatggtgctgggattacaggcatgagccactgcacctggctggttgtaattaactttagttttaatagccacatggggccagtggctgccattttggaccttgctggtgttgtatgactgtttatgctctcagctcccacttagtgggagaatcatgcagagagtcatgagactgaggcaagaggatcatttgagcccaagaaatcgaggctgcaatgagctacaattgtgccactgcaccctagcctgggtcacagagtgaaaccctgtcttaaaaaaaaacaacaaaaaaaccccacaaaaaaccaggtacagtggctcatgcctgtaatcccaggactttgggaggccaaggtgggtggatcgtttgaggtctggagttcaagaccagcctggccaacatggcaaaaccccgtctctactaaaaataaaaaaaaaaaattagccaggcatggtggcatgcacctgtaatcccagctactggggaagctgaggcagtagaatcacttgaacctgagaggcagaggttgcagtgagccaaagttgtgccactgcactccagcctgggcaacagagcaagactccaccaaaaaaaaaaaaaaagacagtggattcttccccagtcaagcctcagatgagaatgcagcccagctaacacctggattgcagcctcatgagatgctgagcagaaggcccagctaaaccctgtcagaatcctgaccccaggaagtgaggaggtaacaagtgcatgttgtttgaagctgctaagtttgtgctgatttgttacacagcaatagctgactaatacagtttctctacaatagccttgacttccttacttctgccacagggattctagatactttatccctgccatgtaggatccgttccttccactggaggcttactcaattcctatttatccttccgaacttgaataactcatcactctctcagaaaaccctcccctgacggcgtgtctaaatcaaagacccctgtacacagattcaaagtttctggttgtgcttctagttttgagccattcttgtagcatcatgttaatggatctgggcctcttccacttggattgaagctctctgagctcagagaatcgtatctgtctcattcagggttcgacgcagccaggcctggcccatcgtaaaggttggctggatggagagagtgaaatgaatggcgcttctatgtttgatgctaaatagctgtggagttctttctgtgaaccaataatggtgatgacaagaccatttagagaacacaggaatccttagaaaacccgcggggcagggtcagcagaggcagctggggttgaatgaacactgtgtgtgtgtgtgcgtgtgtgtgtgtgtgttggggagtgagctcatactctaaatgtgcctttccagctctaatcacagaagtgaatctcggtgtcttttgtttctaaaccatccatcaagtgattcttggagattctctggctcgtctgaaggcagttcaactcaagcgtaagagtaaatgggaaagtgtggtgcagcttcactccccgctgcccctgcctccccaccgcccctgcctcgctccacgctgcccctgccttgctccatgccgcccctgcctcactccccgccaccctggtacatctctcctttctcattggctctggatggtagcggccaggcatggagtggctgttcccagaggaacacgttcccctgaggagggaacattctggctgggccccagcatagggttgccagactcaacaataaaacatttagcaccctcggagacattagaatttcagatatgtattcattcattcattcattcattcattcatttattttgagacggagtctcgctctgtcgcccaggcttgagtgcagtggcgcaatctcagctcactgcaacctccacctcctgggttcaagagattgacctatcttaggctcccaaatagctgggattacaggcgtgtgccatcacgcccagctaattttgtatttttagtagagacggggtttcactatgttgtcaggctggtctcgaactcctgacctcaggtgatccacttgcctcagcctcccagactgttgggataacaggcatgagccacagcacccagccagaatttcagattaacaaccaaaacgtttcttttttttaaacagggtctcactctgtgttgcccaggctggagtgctcactgcaacctctgcctctgaggttcaagtgattttcctgcctcatcctcccaagaaaccatgtgccaccatgcccggctaatttttttattttggtagagatggggtttcgccatgttggccaggctgttctcaaactcctgacatcaggcgatcctcccaccttggcctcccaaagtgctgggattacaggcgtgagccaccgcgcccggtcaaaacatttttttagtaggagtcggagaatgtcctacattttgcacaagagagacatacttatactaaaatacagattagagacagaattcttcagagaaacaggaccaattgagtggatacacagacatatacgcacagatgcacacacagatgcacatgcacacacacacagacacatgcacacacaaatgcacacgtacacacagaccacacatgcacacatacacacatgcacacgtgcacacatacacacatgcacacatgcacacacaaaagcacacatgcacacagatacatacgcacaaacgcacacatccacacatacacagatgcacacacgcacacacagatgcacacccgcacacagactcacacatgtacacacacacagattgagatttattttagggatttggctcataccattgaggggctgcaggtctggaatctgcagggcaggccagagacctagggaagagctgatgctgcagtctcaagcccaaaggctatctggaggcagatttccttcctcttggggaacctcagtcttttaaggccttcgactgattgggtgaggcccaccacattatggagggtcacctgctttatttaatatctaccgatttaaatgttaattgggcttggcgcagtggctcacgcctgtaatctcagcactttgggaggccgaggcaggtggatcacctgagatcaggagttccacaccagcctggccaacatagcaagatcccgtctctactaaaaatacaaaaattagccaggcatggtggcaggcacctgtaatcccagctacttgggaagctgaggcacaagaattgcttgaacctgggaggcagagtttgcagtgagccaagattgcaccactgcactccagcctgggtgacacagctagattccgtcaaaaaaaaaaaaggagaagttaattgggctgggtgggtgcagtggttctcagcactttgagaggctgaggcaggaagatggcttgaagccagtagttccagaccagcctgggcaacatagcaagaccccgtctctaaaaaaaaaaattacgatttttaaaattttcttagaggcagggtctccctacatgatccaggctggtcttgagctctgggctccagtgatcctcctatctcggcctcccaaggtgctgggattacaggtgtgagccactgcaccctgactctacaaagaaattttttaacttagctggcatagtggtacacatccatattccagctactctggaggctgaggtgggaggatcgcttgagcccaggaggtcgaggctgcagtgagctatgatcacaccactgcactccagcctgggggacagagtgagacccccccatctcaaaacaataaaaataaataaatagatgttaattgtatctaaaaattaccttcacagaaacagctagaataatgtttgaccaaagaaccaaagcccggccaaggtattgcatagactgaaccatcccagggacacacttaggctacaaaaggatgtttgattgtctgaaactcaagctccatgcggtgttctgtatcttatctgcccaccgaggcctggttttcatccccacgggtgtccagagcaactccactccctccagagaagccctcggccacgtgggcacgtccaggggaccccgcccggggaaacagaatggcattgttcccccagcttccttttctgtgggtttctaatggggaaaagtgtgttggaggccaggcatgaatcattctccgcccacgcagcagacacagcatcccaggggagctgaggcggaggggaggcaatgagatccacctttgcagacaatgtggaggtgatcccccaccctctgcagagaaaggcgtccctgcagactgagaacatgcagagtttgaggttaaggtctcttggggtctcacgagagtaaaagaatgtaagctagagaaccaggtgtggtggctcccgcctgtaatcccagcactttgggaggccgaggcgagcagatcacccggggtcaggaattcgagaccagccaacatggcgaaaccccatctctactgaaagtacaaagattagctgggtgtggtcaggcgcggtggctcacgcctgtaatcccagcactttgggaggccaaggcgggaggatcacgaggtcaggagatcgagaccatcctggctaacgtggtgaaaccccgtctctactaaaaatacaaaaaattagccaggcgtggtggcgggcgcctgtagtccaagctactcaggaggcggagtcaggagaatggtgtgaacctgggaaatggagcttgcagtgagccaagatcgcaccaccgcactccagcctgggcgacagagtaaggctccgtcaaaaaaaaaaaaaaaaaaaattagctgggtgtggtggcatgcacctgtaatcccagctactcgggaagctgaggcaggagaattgcttgaacccgggaggcagaagttgcagtgagctgagatcatgccactgcactccagcctgggggacagagccaaactccatctcaaaaaaaaaaaaaaagagagaaaagcccaggcgcggtggcctacacctgtaatcctataatcccagcactttgggaggccgaggcgggcggattacctgaggccaccgtggctaccttggcccatccattggtgagaaggggtcacagccggagctcgcagggggcggagctcgcggagggcggggctcgcggggggcggggctcgcgggggcggggctcgagggggcggggctcgagggggcggggctcgcacagggcttgaatcccaggaggagggatcccagtgctcccggtggagtctgcctgccccaggtgtcctgttacatccctcaggggccgacagctgcccagttctgcttagggatccatgcgacacaggcagtttctcgcggaaaatgggtggatcccctgctccaacgagactgaaagcggcaggagcatggatgaacgttgcggtgttgccgttgcacatggctgccacctggccatgttctgggactcatgcttgtaaatccttttacatttcaaagccttagtgatgactcatcagtgggagaacacccggaacagggactggcaaatgattataaacggtcagagaggtggccgggtacagcggctcacatctggaggccgaggcaggaggatcacttgaggccaggagttcaaggccagactggacaacatagtgagaccccaatctctacagagtataaaaaaattaaccgggtgtggtggcatgcctgtagtcctatctactctggaatctaaggcaggaggatcgtttgagcctgcgaggtagaggctgcagtgagctatgatagcaccactgcattccagcctgggtgacagagcaggaccttgtctctaaaaaataaaaaaagattacgtatctattccaggggtcaggaaacaacatcctgtgggccagagccagatctggtctgcagaattattttttcattttattattattactagagactgggtgttgctctgtcacccaggctggagtgcagtggtgtgatcacaggtccttgcagcctcaacctcctggtctcaagcagtcctcccacctcagccttctgagtagctgggatcacagatacgtgccccaccatgcccagctaatttaatttttattttctgtcgacatggggtcttgctatgttgcccaggctggtctcaaactcctggactcaagcgattgtcctgccgcggcctcttaaggagatgggattggccgggcacggtggctcacgcctgtaatcccagcattttgggaggctgaggtgggcagatcacgagatcaggagattgagaccatcctggctaacatggtgaaaccccgtctctactaaaaatacaaaaaattagctgggcgtggtggcgggcgcctgtagtcccagctacttgggaggctgaggcaggagaatggcgtgaacctgggaggcggagcttgcagtgagccgagatcgcgccactggactccagcctgggtgacagagcaagactccgtctcaaaaaaaaaaaaaccaaaaaaacaaagataggattacaggcgtgagccactgcacccagccaggatttgaattttagtgtccataaagtgtgacgagaacatagttgtgtctaattctttacacgtggtcggctgctttagcgtgacaatgggagagtgaagggacacagtcctgactgccttgtgagcatgaaaatatttactgctgccagcacagtggctcacacctgtcatcccagcactttgggaggccaaggcaggtgggtcacttgaggccaggagtttgagaacagcctggccaatatggtgaaaccccatctctactagaaatacaaaaattagccaggtgtgatggcacacgcctgtggtcccagctacttgggagactgaggcatgagaatcacttgaacctgagaggcggagcttgtagtgagatcacgccactgcacagtgcacctgtggtcccagcactttgggaggctgaggagggaaggttgcctgaggccaggagttcaaaaccagcctgggcaatgtagcaagatcccctctccacaaaaaacagaaaaatgaggccgggtgcagtggctcacgcctgtaatcccagcactttgggaggccaaggcgggtggatcacctgaggtcaggagttcaaaaccagcctgggcaacataacaagattcccctctctacaaaaaaatagaaaagtgaggctgggtgaggtggctcatgcctgtaatcccagcactttgggaggccgaggtgggtggatcaactgaggtcaggagttcgagaccagcctggccaacatggcaaaaccccctctctactaaaaatataaaaattagccaggtgtggtgctgggcgcctgtaatcccagctattggggaggctgaggaaggagaatcgcttgaacctgggaggcagaggttgcagtgagcagagactgtgccactgcactccagccaggtcaacaagagtaagactccatctcaatagaaaagaaaggaaaggaaaggaaaggaagggaagggaaaggaagggaagggaaaggaagggaggaagggagaaagggaagggaagggagaaaggaaaatgagcatggcgtggtgacgtacacctgtggtcccagctatgggaggctgaggtgggaggatcacttaagcccggaaatttgaagttgcagtgagccgagatcgcaccacagcactccagtatgggcaacagagagactctctctctctttaaaaaagaaaaaataaaaatcaggggtggggtgtgaaggtcaggagcactttgggttttaggctgctggagggattttagtgtgtgtgtcgcagggatgatgtaatctgatggacacttcaaaggcacccttaacggctgtgaccagctcacagaggggcaggggagggaggaaagaggccagtccctccagacgggatgctggtgggctgtccagagccgtagctgcacagatggtgaggaatgactggattaggaatctcttttgaacactagccaacaggagttgttgatgagtgtgacagaaaaagagtctgtggtcacaaattctttgatgcacctcccttcgaaagctggcactcaggctgggcgcggtggctcacgccggtaatcccagcactttgggaggcccaggtgggaggatcgcgtgaggtcaggagtttgagaccagcttgggcagcataggaagactccctctctacaaaaaacttaattagctgggcatagtggcacacacgtggccctagctactaggaggcggaggtgggaggatcgcttgagcccaggaggtggaggctgcagtgagctgtgatcacaccattgcactccagcctgggcaacagagaaagaccctgtctcaaaaacaaacaaaaaaggaggcgggagggtgagaaagagagactggaagaggctgcactgtggctgtgaagggagaagaaggggccctgaggcttaagacgctggtaaagatgggaaacgtattctcccctggagcccccagaagggcccaggcctgcccacagctcgatggtgagccctgcaagatggatctcagacttctgactttcagaactgtgagataatcaatcagtattccatttttaaattctttgagacagggtctggctctgtcacccaggctggagtacagtggcacaatcacagctcactgcagcttccacctcctgggctcaagtgatcctcctgcctcagcctcctgagtggctaggattacaggcatgagccaccacatctggctaatttttgttcattttttgtggagatgggggtctcactatattgcccaggctggtctcaaactcctgggctcgagcaatcctctcacctcagcctcccacaatgctgggattacaggtgtgagccaccacgcctggccgaaaactcggtgtccctctaagcccccaagcgtggggtcctttgttacagcagctgtgggaacttcagacttactctttctagcaatggaccgcagcgacccacgggagtcctcatcctcacacagccgcccagccagcagtcacgttccaccttttttttttttttttgagatggcgtcttgctctgtcgccaggctggagtgcagtggcgtgatctcagctccctgcaacctccgcctcccgggttcaagcgattctcctgcctcagcctcccgagtagctgggattacaggcgcccaccaccacgcctgactaattttttgtatttttagtagagatggggtttcaccatgttggccaggctggtctcaaactcttgacctcaagtgattcacccaccttggcctcccaaagtgctgggattacaggcataagccaccgcatctggtcttttttttttttttttttggagtctcgctctgtcacccgggctggagtgcagtagcgtgatctcggttcactgcagcctccgcctcccgggttcaagcgattctcctgcctcagcctcctgggtagctggattacaggtgtgcaccaacatgcctggctaattttggatttttagtagagatggggtttctccatgttggccgggctgatctggaattcccgacctcaaatcgtcctcctgcctcagcctcccaaagtgctgggatgacaggcgtgagccaccgcgccccgccgtttttaagggtatagttgcaacccttgcttatgggaagagaagcaccttcagcctctgaccccgtgtttctgtcttgctgtgtggcatccagctcgctgtctgcgtgtctctgagccatggagcccactgtggctgacgtacacctcgtgcccaggacaaccaaggaagtccccgctctggatgccgcgtgctgtcgagcggccagcattggcgtggtggccaccagccttgtcgtcctcaccctgggagtccttttgggtaagtggctatgggattggctgggttcgcaatacaagggacatgtgcaaagtcaccgggaagtgacttgatggtgtctccttggccatctggaatcaaagggcagtgtctaggcgtggagatgaaggctgccctaggccaggcgggtgggcggggagtggagcagatgagttcctacgtgtgtcagttttcccgactaaagaagctcccgaaggaagttttcacagctggggtgacagagaaacagagacagggaaatgaccttgttttaaattttggcaaatcagcaaaatacccaaagtagtttttttttttgtttttttttttttttgagacggagtctctctctgtcgcccaggctggagtgcagtggtgtgatatctcggctcactgcaagctccacctcccgggttcacaccgttctcctgtgtcagcctccccgagtagctgggactacaggcgcccgccaccacccccggctaattttttgtatttttagtagagacggggtttcaccgtgttagccaggatggtctcgatctcctgacctcatgatccgcccgcctcagcctcccaaagtgctgggattacaggcatgagccaccgcgcccggccccaaaagtatttttataaaaccgagcaactgggttgggcgtggtggctcccgcctgtaatcccagcactttgggaggctgaggcgggaggaccatcggagcccaggagtttgagaacagcctaggcaacatgataaagccctgcctctacagaaaatacaaaaaattacccaggcgtggtggcacctgcagtcccagctactcaggaggctgaggcaggagaatcgcttgaacctgggaggcagaggttgcagtgagctgagatcgcaccactgcactccagcctgggtgacagagtgagactctatctcaaaaaataaaaacataataataaatttaaaataaggccgggtgcagtggctcatacctgtaatctcaactttttgggaggctgaagtgagcagatcatgaggtcaggagttcgagaccaccctgaccaacatggtgaaaccccatctctactaaaaatacaagaaagaaagaaagaaagaaagggagggagggagggagggaggcaggcaggcaggtaggcaggaaggaaggaagatagctgagcatggtggtgcacgcctgttatcccagctacttgggaggctgaggcaggagaattgcttgagcccaggaggaggcagagattgcagtgagccgagatcatgcccttgcagtccagcctgggcaacagagcaattccatctcaaaaaaaaaaaaaaaaaaaaaagttaattttaacatttaaatgatgataataaacagcaatttggggagaaatgctctcgtgtggcaaaatagtaagttcgcgatcctatgagaatcctcctaggtttttttttttcttttttcttttttttaaaaaatatttgtggaacttctggaaactcccagagccagacatgtttgactgaggccctctagtggctgtaggtaccaagtacaatacaatttgggttcctcgtgtgagtgtatttgtgtgttcatgagtgtgtgcatggtgcacacgtgttcatttgcatgcgtttgtgcatgcatgtgtgtgtctgcgtgtgtatctatgtgtgcatgcgtgtgtgtgtgtgtgtgtccatcacctagtgagaggcaggggcggggcagagtttctcatctgcattgtaacaaatacattttgggaaaaacagataaatataattcccatcaggacccccctgaaaggaaaggaagtctttttttttttttttgagatggagtctcactctgtctcccaggcgcgacagagtgcagtggcacaatctcagctcatcacaacctccaccacccaggttcaagcgattctcctgcctcagcctcctgggtagctgagattacaggtgtgtgccactacgccgagctaatttttgtatttttagtagagatagggttttgccatattggccaggatggtctcaaactgctgacctcaagtgatccacctgccttggcctccgaaagtgctgggattacagacatgagccaccacgccccatcaggaagtctttcaagaagcacttaaggccaagtgtggtggctcctgcctgtaatcccagcactctgggaggctgaggcaggaggattgcttgagctcaggagttcgagaccaacctaggcaacatagcaagaccccatctctacaaaaaattaaataatgaagacaagaaacatttaaaattaaaattttataatgttttcagtgaaaatgagtggttgtgcgtgccagtagtccctgctactcgggagactgaggtgggaggattgcttgagcccaggagttggagcctgcagtgagctatgatcacaccactgcactccagcttgggagacagagtgacaccctgataaaaaataaaaaagaaaaagaaaaaaggacatgatgccaggcgtagtggctcacgccagtaatcccagctctctgggacgctgaaacgggaggattgcttgagcccaggagttccagttcagcctggtaacatggtgaaaccctgtctctacaaaaaatgcagaaaattagccagggccgggcgaagccagctgggctcctgagtcgagtggggacttgaagaattgttatgtctagctggaggattgtatatgcaccagtgaacactctgtgtctagctaatctggtggggacttggataacttttatgtctaactagaggattgtaaatgcaccaataagcactctgtgtctagctcaaggtttataaacacaccaatcagtgctctgtgtctagctaatctagtggggacttggagaaattttaagtctagctaaaggtttgtaaatgcaccaatgagcaccctgtgtctagctcaaggtttgcaaatgcaccaatcgcaccaatcagtgttctgtgtctagctaatctagtggggacttggagaacttttgtgtctagctaaagatttgtaaatgcaccaatcagcaccctgcgtctagctcagggattgtaaacacaccaatcagcaccctgtcaaaacggaccagtcagctctctgtaaaatggaccaatcagcgctctgtaaaatgggccaatcaggaggatgtgggtggggccagataagggaataaaagcggactgctggagccagcagcggcaaccggcttggggaccttttcacagtgtagaggatttgttttttaattctctgcgagaaatcttgctgctgctcactcgttgggtgtgagatgcttttatgagctgtaacactcactgtgaaggtctgcagtttcactcctgaggccagcaaaaccacaaacccaccaggaggaatgaacaactccagacacgctgccttaagagctgcaacactccctgggaaggtctacagcgtcactcctgaagcaagcaagaccacgaacccaccagaaggaagaaattccgaacacatccgaacatcagcaagaacaaactccggacacaccatctttaagaaatgtaacactcagcgtgaggatccgcagcttcattcttgaagtcagtgagaccaagaacccacgaatttcggacacagtaacatggggaaaccctgtctctacaaaagaatgcaaacaattagccagggccaggcatagtagctcaccccggtaatcccagcactttgggaggctgaggcaggtagatcatgaggtcaggagtttgagaccagcctggccaacatgggtgaaaccctgtctttactaaaatacaaaaattagctgggcagactggtacgcgcctgtaatcccagctactcaggaggctgaggttggagaattgcttgaacccgggaagtggaggttgcagtgagccgagatcatgccactgcactccaacctgggcaacaaagggagaccatgtctccaaaaaaaaaaaaaaaaaaaaaaagctgggcgcggtggctcccacctgtaatcccagcactctgggaggccgggttgggcggatcatgaggtcaggagattgaaaccatcctggccaacatgatgaaaccccgtctctactaaaatacaaaaaacattagttggtcatggtggcatgtgcctgtagtcctagctactcgggaagctaaggcaagggaatcgcttggacccaggaggcagaggttgcactgagccaagatcgtgccactgcatcccagcctggcaacagagtgtgagactgtgtcaagaaaagagaaggaaagagaaagctagccagccaggcgtgatagtgggcgcctgtggtctctgtggtctagctacttgggaggctaaggcaggaggatcacctgagcccatgaggtcgaggctgcagtgagcagtgattgtgccactgcactgaagcccgaacaatagagaccttgtctcaaaaaaataaaacatttaaaaaaataaaaatgagaattcagcccttcgcaaacagctcaccattttagttggagatgagaggctgagtggagagcgggaggcgttctgaactatttctgcaacttcctgaatctgcagttgtttagagtagaaacagagtgaggttgggacacagaggcggggcaattcagtccgcccaccagggtgctcgtgtttctttagtttcttgaacgagaaaacataccgtttttagaattggttcagaatattctatctactgaatatatggctacgtaaatacccatctagcatatctatccatttaggataaacggaattgggacccagctttcacggtttacgcggttgctatttgcatggtttaaatgttgtaattacggccattttttttgcgctggtgtgcacttctggtagttttaacgtatttttgaccaaaactcgtgctctcatggtttctgtggttgctctcgtagtttttatttagatttttttctgctgctgcttgcatcagcataggaattttttatgactattatttttgctgtactttgtactttggacacaacacagccaacagctaaaaaccagtgctttctgcctggcgtggtggctcacgcctgtcatcccggcactttggcaggctgaggcgggcagatcacctgaggtcaggagttcccgaccagcctggccaatgtggcgaaaccccatctctgctaaaaatacaaaaattaacgctgggtgcagtggctcacgcctgtaatctcagcacttcgggaggccaaggcgggtggatcacctgaggtcaggagttccagagcagcctggccaacatggtgaaatccagtctgtactaaaaatacaaaaaaactagccaggtgtggtggtccacgcctgtaatcccagctactcagcaggttgaggcaggaggctgaggcaggaggatcgcttgaacccgggagatggaggttgcagcgagctgagaaaacaccactgcactccagcctgggtgacagagtgagaccctatctcaaaacaaacaaggccgggcgcggtggctcatgcctgttaatcccagtgctttgggaagccaaggctggcggatcatctgaggtcgggagtttgagaccagcctggccaacatggagaaaccccatctgtactagctgggtatggtggtgcatgcctgtaatctcagctactccggaggctgaggcggcaggagaattgcttgaacccgggaggcggaggttacagtgaggcgagatcatgccattgcactccagtgtgggcaacaagagcaaaactctgtctcaaaacaaacaggccgggtgtggtggctcacgcctgtaatctgagcactttgggaggccgaggagggcggatcacgaggtcaggagatagagaccatcctggctaacacagtgaaatcccgtctctactaaaaatacaaaaaaattagccacgcgtggtcgtgggtgcctgtagtcccagctactcgggaggctgaggcaggagaatggcatgaacccgggaggcgcagcttgcagtgagccgagattgcgccaccgcactccagcctgggcgacagagcgagactctgtctcaaacaaacaaacacaaaccaaccagtggtttttgaagatgacctcatgggactgtggccggagagtcctgatggcctctggctgtgctcatgcccctgccataggaggcggggactgtcatttcaccgtctcctgatgccattccagaggttacgccctgaagtcagctcagatcctgggccaggcactgcatgggagacaggcatgagcaggacctctttctgccttcgaggaaaacacgggggcatctggggctcacttggcactcatccaccttgtgctgtacctggggacctccgggtgggtggctgtcatagaattcggctccaaaccaggatgcttttgggaattgagggagagccctgtgagtagctattcagggctatcacgggggcgtcgaccaccccactgcgtgtcaggagtgaccaccagggtgtgtgagtgcaaacagggcggggcctgggtggcagctcagcggagccctgagcccccaaaggtgggctctctcacgggccctggtctcgtccccagccttcctctctacacagggcttccacgtggaccacacggccgagctgcggggaatccggtggaccagcagtttgcggcgggagacctcggactatcaccgcacgctgacgcccaccctggaggcactggtgagggtggtctgtgtttgggggccagggaggaagagcgggtggccgggggctttgacctggaggtgctttccgtgtgggagggaggcaggccacaggcaacgaagctgaggtggaggctgtgagaccgggaggccaggccagggggcgggcaggacgaggccaggtggccaaggcagatacctgcaaggcagagctgtatccactgaggacacactcacatgggactttaggccacatttagaggtttttttttttttcttttttttcttgagacggagtctcactctgtcacccaggctggggtgcagtggaatgatctcggctcactgcaagctccgctgctcaggttcaagcgattctcctgcctcagcctcccgagtagctgggattacaggtgcacgccaccacgtccagctgatttttgtatttttagtagagacggggtttcaccatgtaggacaggatggtcttgaactcctgacctcaaatgatcttccctccacggcctcccaaagtgctgggattacaggcgtgagtcaccgtacccaacctgccacatttagagttttacattttattctaaaggggaatcagagccctcatgcacagctgggggaaggtattttattttatttttttgagacggagtcttgctctgttgtccaggctggagtgcagtggcaggatcatggctcactgcaacctctgcctcccgggttcaagcgattctcctgtctcagcctcctgagtagccagggttacaggcacccaccacctaggatgaacagggaaacacagcgtggctatgcacacactggaatatgactcagccaggaaaaggggccaggcttggacacaggacacagcgaattatattttaatgaaaaaataatgttttccattttattcgaagagaaacagacgtgtgaccacatcagcaatcacgtattaaaaacagcactccaggcgggcacggtgggtggctcacatctgtaatcccagcactttgggaggccgaggagagtggatacctgaggtcaggagttttgagaccagcctgagcaacatgacaaaatcccaccattagtaaaaacacaaaaattagcggggcgtggtggtgtgtgcctgtagtctcagctactcgggaggctgaggtgggaggattgcctgagcccaggaggcagaagttgcagtgagccaagatcgtgccattgcactccagcctgggtgaccgagtgagactccatcttaaaaaacaatttttaaaaataggctgggcgtggtggctcacgcctgtgacgcctcctgggctcaagcaatcctcccacctcagcctcccgagtagctgggagtgcaggcacacaccaccatgcccagctaatttgggaggctgaggtgggcggatcacgaggtcaggagttcaagaccagcctggccaacatagtgaaaccctgtccctactaaaaaatacaaaaaattagccacgcatggtggtgtgtgcctgtaatcccagctacttgggaggctgaggcaggagaattgcttgaacctgagagacggaagttgcaatgagccgagatcgtgccactgcactccaccccaggcgacagagcaagactctgtctcaaaataataataataataaaaaatttaaaaataaaacataagtctgggcgtggtggctcacaactgtaatcctagcactgtggaaaaccaaggcaggtggatcacaaggtcaggagttcgagaccagcctggccaacatagtgaaaccccatttctactaaaaatacaaaaaattagttgggcatggtggcgggcacctgtaatcccagcttcttgggaggctgaggcagcagaatcgcttgaacctgggaggcggaggttgcagtgagtggagaatgcactactgcactccagcctgggtgacagagcaagactctgtctcacaatacatacatacatacatacgtacatatagataaaaatttaaaataataaaaggaaatgctttcccatggaaccaaccccttctccagctccctccaacacctgacaggcctctgcagtgccagggtgcccatgctgtgggtctcaacatttgatattcttgtttctattgcagtttgtaagtagttttcagaagacagagttagaggcaagctgcgtgggttgctcggtactgaattataggtgagttggagcttccattgggtgaaggaaacttggtggacatctgggagtttctggaggagtccagaaaagtttggaagattctagaagattccagaagattccagcagggcggagcccctccctctccaagggcctctcctccatacctgtagggatgggaactccagtgtcctcgtacatttccagctgcactttctgctgcgacccctccagacgctgagcctgggcctggaggaggagctattgcagcgagggatccgggcaaggctgcgggagcacggcatctccctggctgcctatggcacaattgtgtcggctgagctcacaggtgagtgggcagccgagaccgaaaccccatcacgaggaggctggagtggggcaggagctgcaagatacattttgataaccaccccttcccataaaaagaaaacaaactggccgggtgtggtggctcatgcctgcaaccccagcattttgggaggccgaggcgggtggatcacctgaggtcaggagtttgagaccagcctggccaacaccccatctgtactaaaaatacaaaaatcagttgggcgtggtggtgtgcacctgtaatcctacctacacaggaggctgaggcaggagaactgcttcaacctgggaggcggaggttgcagtgagccgagatcgtgccattgcactccagcctgggcaaaaagagtgaaacttcgtttcaaaaacaaacaaacaaacaaatgtaaaaactgacattgcctttgccttaatggtgtggataaggggtcagccatcttgttctgtaaagagccagagtgttgtgttgtgttgtgttgtcttgtcttgtcttctcttttcttttccattttttttatttttgagacaggatctcactctgttgcccagtctggagtgcaataatgaagtcttggctcactgcagcttctgcctcccaggttcaagcaattttcctgcctcagtagctcccgactcactcccgagtagctgggattacaggcacgcaccaccacgcctggctaatttttgtatttttagtgagatggggtttcaccatgtgtactgggctggtcttggactcctgacctcaggtgatcctcctgccttggcctcccaaagtgctgggattataggtgtgagccacgtgcccagttaatattttcatctttgtggtccgttgggtttctgtgacaagcactcagctctgttatttgtagcacaaaagtagccacagacaatacataaatgaataggtgtggctgtttaccaataaaacttattaaaaataacaagcagtgggctggatttggcctatggccgtagttggccaaccccctactgtagaatcaaggataaatgctacactctaataaaattgtatggaaggccgggtgtggtggcttatgcctgtaattccagcaatttgggaggccaaggtgggctgatcacttcagatcaggagttcgagaccagcctggccaacatggcgaaaccccgtctctactaaaaatacaaaaatgagctgggtgtggtggcacgtgcctgtaatcccagctgctcaggaggctgaggcaggagaattgctggaacccaggaggcggaggttgcagtgagccaaggttgcactactgcactccagcctgggtgacagagtgagactccatctcaaaaaaaaattaataaaaataaaaaataaaattatacagtgcatgattttgtatgcacctggttttaaaaaataaaaaacaaaattgtacggtgcagcaggtcatgattggagagtcagatgcaagttcagaccattgttaaagatttgttgccaggtgtggtggctcatgcctgtaatcccagcactttgggaggccgaggtgggtggatcacctgaggtcaggagtttgagaccagccgggccaacacggtgaaaccccatctctactaaaaataaaaaaattagccgggcatggtggcgggcgcctataatcccagctacttgggaggctgaggcaggagaattgcttaaacctggtggaggtggaggttgcagtgagccaagatagcaccactgcactgtagcctgggtaacagagtgagactctgtcttaaaaaaaaaaaaaaaatggccgggcgcggtggcttacgcctgtaatcccagcactttaggaggccgaggtgggcagatcacaaggtcaggagatcgagaccatcctggctaacacggtgaaaccccgtctctactaaaaatacaaaaaatcagccgggcgtggtggcgggcgcctgtagtcccagctgcttgggacgctgaggcaggagaatagcgtgaacccgggaggcggagcttgaagtgagccgagatcgcgccactgctctccagcctgggcgacagagggagactccgtctcaaaaaaaaaaagtcaccttgaccttgacatgcaggacatttatggttccctccccaccaaccgtcacatgctggtcgaggtcttaataacctctgctccagcgttcacagaacttcccttggtgatagggaggttccaggccttgtgcagtttggtggccgtccgagccctggggctggtgagtgctccccgtggggcaagtgagactgaggatcggtgttgaagtagatttcatcctcgctgattgaaggcagaatttaagtgacgccagggtggacaaggcagctgctcactttactccatgacctgcctgcaataggacgttttctttctttcttttttctttttttttgagatggagtctcgctctgtcgcccaggctggagtacaatggtgtgatctcggctcactgcaacctctgcctcccgggttcaagcgattgtcctgcctcagcctcccgagtagctgggattacaggcgcccggcaccacacccgtctaatttttgtatttttagtagagacagggtttcaccatgttggccaggctggtctgtaactcctgaccgcaaatgatccacccgcctcagcctcccaaagtgctgggattacaggtgtgagccaccgcgcccggccaataggatgtgttcaaagggttttaccgcttattcagtgagcttctatcttctctgttttgttgcagggagacataagggacccttggcagaaagagacttcaaatcaggtatgtttttctctctggccttttctctgattgcagttactgacagaggtttcctaagactcatttcaaggaagtgaaggaatccctggaacgaggctgggcgcggtggctcacatctgtcgtcccagcacttcaggaggctgaggcaggaggatcacttgaggccaggagtttgagaccaggctggacaacagagcgagaccctatctctacaaaaataataataaaaaaaggccaaaaataatttttaaaattattataaaaaataataaaaattagccgggcatagtggcgtattgcctgtactctcagctacttgggaggctgaggaaggaggatcgcttgaacccaggaggcagaggctgcggtgagctgagatcacgccactgcactccagcctgggtgacagagtgaaactgtgtctcaaaaaataatacataaggccgggcgcactggctcatgcctgtaatcccagcactttgggaggccgaggtgggtggatcacctgaggtcaggagttcgagaccagcctgaccaacatggagaaaccccatctcactaaaaatacaaaattagccaggcgtggtggggcgtgcctgtaatcccagctactcaggaggctgaggcatgagaatcacttcaaccagggaggcggaggttgcggtgagccgcgattgtgccattgcactccaggctgggcaacaagagtgaaactctgtctcaaaaaaataaataaataaaataaaataaaaataaataaaataaatagcctgggttggtggtgtgcacctgtggtcccaactactcaggaggctgaggcaggaggattgcttgaacctggagttagaggctgcggtgagctgtgattgcaccactgcactcccgtttgggtaacagagctagaccctgtctcaaaaacaaaaataaaaacaaggaaaaggaaagaaaaggagagagagagtttccacatttccgtaccctggtggtactaagtatagcatggtgccttactccaaccaggagatgtagcatgaggtcagaaagtcggttcttttctgtcctcaggccgctgtccagggaactccttttcctgcgggaacagccagtgtgtgaccaaggtgaacccggagtgtgacgaccaggaggactgctccgatgggtccgacgaggcgcactgcggtcagtctgcctgtctggcctggtctctgggccccttcccttttccagggtcagctgctggctctggtctgtggtcactgtgcttatttcactgggcacacaggcctggcatttatgggggctgggcagagaaaagaaaggggcacccatggtatggggagaaacatgagcaaacagcagagtaaaggaaaagtgcaggtgtgtgatgggaagaagcctggggagaggagggagaagatatcaggctgaaaacagaggttgtggccacagcctgggaagtgttgaataccaggaactggagctctgtcctataagcagtggggcgtggccacagggatgtgagcaacggaaagagacaattaaaatgccgtaagagattagcagggtgcggtggctcacacctgtcatcccagcactttgggaggccaaggcaggaggatcacttgaggccaggagtttcagaccagcctggacaatatagtgagaccccatctctactaaaaaaaaaaaaaaattggccaggcacggtggctcacacctgtaatcccagcactttgggaggctgaggcaggtagatcacgaggtcaggagatcgagaccatcgtggctaacacggtgaaaccccctctctactaaaaatacaaaaaattagccgggcgtggtggcgggcgcctgtagtcccagctatttgggaggctgaggcaggagaatggcgtgaacccgggaggtggagcttgcagtgagccaagatcacgccactgcactccagcctggcaacagagcgagactctgtctcaaaaaaaaaaaaaaaaaagaaaaaaaaattagccagcgtggtggtgggcgcctgtggccccagctactcaggaggctgaggtggaaggattgcttgagcccagtagattgaggctgcagtgagctatgattgcactactgcactgtccagcctggataatagagtgagaccttgtctcaaaaataaataaaatgctggaagagtagccaatgtttctataaaaatactagcccatgcaataaggtaaggacagcagtttaagtattgaaaaggaagaggaaaatcttaattcatttgaaatcattgtctgtctaaaataaatcaatatccaaacagaaggagagaagctgaaagagtaaaataaaatgaatcaagaaattgactaaaaagctatttagaataaaggctgggtgcagtgggtcacgcctgtaatcccagcactttgggaggctgaggcaggagaatcccttgaacctgggaggtggaggttacagtgagccaagatcacgccactgtactccagcctgagctacagagcaaaactctgtctcaaaaaaaaaaaagctgtcattttgctttatacagtaataataagatagaagatacaaaggaaaaaatatctttcatgatcagtagtgacaaaaaatatcaagactaggcctgatgccgtggctcaggcctgtaatcccagcactttgggacgccgaggcaggcagatcacttgatgtcaggagttcgagaccagcctggtcaatttggtgaaaccccggctctactaaaagtacaaaaaattagccaggtgtggtggcgggtgcctgtaatcccagctactcaggaggctgaggtaggagaatcccttgaacccgggaggcagagcttgcagtgagttgagatcacgccactgcactccagcctggacaacagagcgagactccatctcaaaaaaaaaaaaaaaaaatcaaagactaaacttacaaacgtgccatgcctgtgatgataattattatatataattatagaattacaaaattttgtgaaggacataaaagtagactaaataagcagacagacacaatatcctatacaaacatgtacgtggggtcatcgccccttacccacagctaagatagagacctttctctgccactcactggtgcacgtgaccttgaatgcttgacctacgtgccaggatggggcagccgaggagttgaagaggaagggatggggagaccccagaagagtcagggaagccaaggaggggcccccaagcatctctttgaacttagggactgtagacgagagactcagagatgcatgttctgggagttcagggtgaggtcctgccttcgtggggtcatggctggtgacctgctgtcttgcagagtgtggcttgcagcctgcctggaggatggccggcaggatcgtgggcggcatggaagcatccccgggggagtttccgtggcaagccagccttcgagagaacaaggagcacttctgtggggccgccatcatcaacgccaggtggctggtgtctgctgctcactgcttcaatgagtaagcccccatcccaaagcaccaaacccgaaccctctgtatttctcctgccttccctcgtgcactggggacgtcacttctggtttccttagagcccctggaagtaattttttcttttcctttctttcttgcttttgctgttgttgaatctgagggcattctttttttttttttttttgagacagaatctcgctctgttgtccaggctggagtgcagtgacgcgatcttggctcactgcaagctccgcctcctgggttcacgccattctcctgcctcagcctcccgagtagctgggactacaggcgcccgccaccacgcctgttgtatttttagtagagacggggtttcaccgtgttagccaggatggtctcaatctcctgaccttgtgatctgcctgccttggcctcccaaagtgctgggattacaggtgtgagccatcgtgcccggcctcttttctttctttctttcttttttttttttttgagatggagtctcgctctgtcacccaggctggagtgcagtggcgtgatctcggctcactgcaagctccgcctcccgggttcacgccattctcctgcctcagcctcccgagtagctgggaatacaggcgcccgccaccacgcccagctaatttaatttttttttgtatttttagtagagtcggggtttcaccatgttagtcaggatggtctcgatctcctgacctcgtgatccgcccacctcggcctcccaaagcgctgggattacaggcgtgagccactgcgcccggcctctttattttattttattttttcttttgagacagagtctcagtctgtcgccctggctggagtgcagtggtgcgatctcagctcactgcaacctccacctcctgggataaagcaattctcttgcctcagcctcccaagtagctgggactacaggtgcacgccaccatgcctggctaatttttttttttttgtataattagtagagatgggttttcgccatgttggccaggctggtctcgaactcctgtcctcaggtgatccgcccacctcagcctcccaaagtgctgggattacaggcgtgagccaccgtgcctggcccacttgctgttcttttgagagtagccatgccagtgggtgtgaagtagcatctccctgtggttttgacttggatttctcggtgaccaatgacattttgttgatgttttgctcattgtggacattttttgcattcactttgattttttaaaatattctgtcgtgatattatcctttttttttttttgagacagagtctcactctgtcgccctgctggagtacagtggtgcagttttggctctctgtaagctccacctcccgggatcaagcgattctcctgcctcagcctcccgagtagctgggattacaggcacccgccaccatggctggctaatttttgtatttttagtagagacgtggttttgccatgttggccaggctggtcttgaactcctggcctcaagtgatctgcccgtctctgcctcccaaagtgctgggattacatgtgtgagccactgcacccggctcgatatcatttatcttgatggctgagatttttggcaactctttaaattttgtgcccaaggctcatggctggctcccctcaccctaatcccaactctgtctcatcctgtctttgtttaaaatgttgatacttggacaggctatagtgagcttgtggctcatgagtgtaatcccagcactttgggaggctgaggtggggggatcacttgaggtcaggagtttgagaccagcctggccaacatggtgaaagcttgtctctactaaaaacacacaaaaaaattagtcgggcatagggggcgcaaacctgtcatcccagttacttgggaggctgaggcacgaggatcacttgaacccgggaggtggaagttgcagtgagctgagatcacgccactgcactccagtctgggagacagagcgagactctgtctcaaaaaaacaaaacaaaacaaaaatgttgatacttcatgcatcatgcattctcctgcacctgtgatttttttcttttcttttctttttttttttttttttttttgagacaggttacctgttgcccaggctggagtgcagtggcgcagtgatagctcactatagctcatgacagcctcaacctcccaggctcaggcaatcctcctacctcagcctcctgaggagctgaaaccacaggtgcacatcgccacaccccgctaatatatatatattttttctgagacagagtcttgctctgtcgcccaggctggagtgcagtggcacaatatcagctcactgcaacctccacctcccgggttcaagcaattctctgcctcagcctcctgagtggctgggattacaggcgcccatcactatgcccggctaatttttgtatttttagtagagatggggtttcaccatcttggccaggctggtcttgaattcctgccttcgtgatcctcccgcctcagcctcccaaagtgctgggattacaggcatgagccaccgcacctggcctgttttttgttgttgtttttaaagactgtgtttcgctatgttgcccaggctcgtcttgaactcctgggctcaggtgatcctcccgcttcagcctccaaaagtgtgggattacaggcatgagccactgtgtctggcctgatttttataaatactattcataaatattaatgtggggggataccccttacattttgcacccaaggcgagtgtcccgtctgcctcccccgacggctctgaccctcggtggcttctgagctggggtttgctcctgcaggttccaagacccgacgaagtgggtggcctacgtgggtgcgacctacctcagcggctcggaggccagcaccgtgcgggcccaggtggtccagatcgtcaagcaccccctgtacaacgcggacacggccgactttgacgtggctgtgctggagctgaccagccctctgcctttcggccggcacatccagcccgtgtgcctcccggctgccacacacatcttcccacccagcaagaagtgcctgatctcaggctggggctacctcaaggaggacttccgtaagcatcttcctcggcctgcaagtgagctcaggcaggcaggcgggcaaataacgcagaaaagggccaggtgaggtggctcacgcctgtcatcccagcactttgggaggccgaggcgggtggatcacgaggtcaggcgtttgagaccagcctggccaacatagtgaaaacccgtctctactaaaaaatacacacacacacacacaaaattagccaggcatggtggtgcgtgcctataattccagctactcaggaggctaaggcaggagaattgcttgaacccaggagatggaggttgcactgagccaagatcgcaccactggactccagcctgggtgacagtgggaggctccatctcaaaataataataataataataataataataataataataataatgatgatgcagaaaaacacagtgggtctgcattattctctgattctgtattcacgaattccactgcttgctaagatatatttataacccatcatcgatgctactgcgattttttttttttttttttgagatggagttttgctcttgttgcccaggctggagtgcagtggtgcgatctctgctcactgcagcctccgcctccgggttcaagcgattctcttgcctcagcctctgagtagctgggactataggcatgcaccaccacacccggcaactttatttttgtattttttagtagagacaaagtttcaccgtgttggccgggctggtcttgatctcctgacctcgtgatcttcctgcctcagcttcccaaagtgttgggattacaggtgtgagccacctcacccggccaaaaaaattgatcttaatgtactaaaatgcacatctaaatagtcacctgtggccagtggctactatattgggtggtgtagttccagggggttgtcaatcagccacaagatgactgacagagggaaatgaatccagtggagaaaaataaggtgggggtggcagctgcagctttaaatagggaggtcaggagatgcctcctggagagaggagatgaaggagcaagtcaggcaaattctgcagggacaagcatttcagacagcgggaacagcatgtgcaaaggccctggggtgggaggacagcagggcaggggttgatgtgactgatttaatatttagcaagggtggtgctggctgccgggttgggaatggatttcagtggggtgggaccagagtaagagaagtgagtggggaacagctataatgacccgggcaaggatgggcgtgagacaggggctgattctgtgtatatttgggggctgacctgaggccaacttggaatttgaggactgtggacctggaatgaggggcctgagatccctgagatggggaatgctgaggggtggagcttgcggaagggagatgaggacctcgggctgggggtgttaagtctgatgcctcttccttgtccaggcagagagtgttaccaggtggggtgtttaccttttgtagtttcagagccatgtgttgtaggtggccatgcttggagctggggaaactgagggaggcttggagaggagctgtccttcagcctcccagctcaaagtggctgccagggctccggcactctcaccctgcttttctctccccattcggccagtggtcaagccagaggtgctgcagaaagccactgtggagctgctggaccaggcactgtgtgccagcttgtacggccattcactcactgacaggatggtgtgcgctggctacctggacgggaaggtggactcctgccaggtgagcccccgatgccccagaccccagaaaaacacagaaatagacacgagcatgttcaaatgctgagcaattcacagatatctggatgcccgctgtgagcccccaacgccccagaccccagaaaaacacagacacgagcgtgttcaaatgctgggcgattcacagatatctggatgcccgttcttgaggaattttaaagcagttgggattgagaggcaggtgctgcttagaggatcttccagaagctctaacctgacttcaatccctcctctgccctccatggctccctgctcccttccagtgggccccaggtgcgtgccacagagcctggggtccctgagtaatctccctggctatgatggggtccctgtgtaaatcccccccagctgccctccaaaccgggacttgtgtggggacacagacactgttcccagcactgggcctgatacaacgtggcacccaagaaacacctcttgtatgaatgatgccagcacataccctgggcatcagattctctccgtctgtatgggaagggttggtctatgggaaccccgtggacttttgcccctgggtggtcagctgggccatgagtgagctgcaggctcaactcaagaaggttccagggctgggcacggtggctcacgcctgtaatcccagcactatgcgaggccaaggcgggtggatcacttgaggtcaggagtttgagaccagcctgagcaacatggcgaaaccttgtctctactaaaaatacaaaaattagcctggcgtggtggcaggtgcctgtaatcccagctcctcgggtggctgaggcaggagaatcatctgaacctgggagctggaggttgcagtgagctgagatcacgccattgcactccagcctgggcgacaaagcaagactctgtctcaaaaaaaaaaaaaaaaaaaaaaaaaaaaaaaaaagagaaaatcaggggtcatccaaagctgcttctgctgtatacctggaaccttctttttcttcttcttctttttttttttttttgagatggagtctcactctgtcacccaggctggagtgcagtggtgtgatctcagctcactgcaacctccgcctcccaggttcaagcgagtctcctgcctcagcctccagagtagctgtgattataggcatgcgccaccacacctagctaatttttgtatttttaattaagacactgtctcgctctgtcacccaggctggagtgcagtggcaccatcttggctcacctcccagtttcaagtggttctcatgcctcagcctcccgagtagctggaataacaggtgcccaccaccacgcctggataatttttatacttttagtaaagacagggtttcgccatgttggccaggctggtctcgaaatcctggcttcaggtgatctgcccaccttgtcctcccaaagtgctaggattacaggtgtgagccaccaggcccggccgacaattataatttttgttttcaaggtgtctcattctttcttctttcagccacctggtcttgtttgcagtgtcctgttcttgtttcgtggataccatttctttctttttctctgaggatcgtaatttaatccgttatgtttcttctatattctatatttgtggttaactgtatttcaggcaaacgtaagttattctgttgtaactgagtgtctttatttcatggagattggaatccctcaactggtgcttaagaatgaaaagctgggtgcagtggctcacacctgtaatcccagtactttgggaggctgaggcagccaggtcgcttgaggccaggagtttgagaccagttagggcaacatagcaaaacttttgtctctacaaaaacaaaaacaaaaacaaaaattagctgggtttggtggtgcatgcctgtagtcccagctacttgagaggctgaggtgggaggattatttgagcccaggaggtggaggttgcagtaagccaagatcacgccactgtactctagcctgagtgacagagtgagacgccgtctcaaacaaaattgaaaatttaaaaatgtcgctcaattcttgccgtgatcttatatttgctattcactttctcttggcgagggacattaacagtttgtgttcttggattctatgtaccctttcaagggaccaaagacctcctggtctcatttatcctttgtggttgcccaaatcccttttctaccccaaccaacccaggtcctcttgagaaagctttctcttgtgtcttgagcttctgcacatgggctgggctgccacttcctctgtcagcctctcgtgagtcttcatggtttctggtccacaaccagggatctctcctgcctaatttttttagcatggctgtggattcctgtctttcttgtgcatacctttgctcttgtttctaaggcctggtgggtgaggaaaagatgggagagactgctacatgtgcttagattgccatattgaaaccagaatctggagaaaatgctaggaactaatgagagggctcatgtttaagaatgtaagagtcggccaggcacggtggctcacgcctgtcatcccagcactttgggaggctgaggtgggcagatcacttaaggtcaggagttcaagaccagcctggccaacatggtgaaaccccgtctctactaaaaatacaagaaattagccgggcgtggtgatgcgtgcctataatcacagctacttgggaggctgaggcaggagaattgcttgaacctgggaggaggaggttgcagtgagccgagatcacgccattgcactccagcctgggcaacagagcaaaactctatctcaaaaacaaaaacaaacaaaaaaacgatacacagaacgtaagggtcagggtgaactggatatgggaaggtaaaaaatggtgaggccggacgagtgacagcagatgagcactttgggagcaatgctgcagctaccagtgagatatatggaggcacccgcgtggcagccatactgccagcctaagcaagtggtgacattatcaaagatctactgagttaagaagaggaggggatgttatttatttgggtcacgttttggcctgccagaggtaggactgaaagacatcttagagatcctatagtccaactgtcttgggttttgttttttttcctccacagaagaggaaacaggttctgagatgtcaatgatcagccccaggtgctctgtgagcttgtgtggagagaggtcctggctgtcccagctcagagctccttcttgggcctcgtagcactggtgtctggactggctgctgccgacccatcctgagggtgtgtgttggtttcctagggtgactcaggaggacccctggtctgcgaggagccctctggccggttctttctggctggcatcgtgagctggggaatcgggtgtgcggaagcccggcgtccaggggtctatgcccgagtcaccaggctacgtgactggatcctggaggccaccaccaaagccagcatgcctctggcccccaccatggctcctgcccctgccgcccccagcacagcctggcccaccagtcctgagagccctgtggtcagcacccccaccaaatcgatgcaggccctcagtaccgtgcctcttgactgggtcaccgttcctaagctacaaggtattttcggggcagaaaggtagaagatgatgtacgtgcctatcttgatttagggagaacggatatcgtcatagtatcttcataattttggatcttcctgttcaaggaaaggtcacatgtgtatccgtttattcccatcttacgttgcgtgtaccctcatggtatctttctgtccacaggtcttgcccatgtcttgttaactatggcgatctatcaatgggatacttttttttttttttgagacgcagtcttgctccgtcgcccaggctggagtgcagtggcgtgatctcggctcactgcaacctccgcctcccaggttcaagtgattctcctgcctcagcctcctgaacagccgggattacaggcacaggccaccacacccggctaatttttgtatttttagtagagacggggtttccccatgttggtcaggctggcctcgaactcctgacttcatcatctgcccacctcagcctcccaaaatgctgggatgacaggtgtgagccaccatgcccggtctggaatactttctattgtattttcaaatagtttgtacccagacaacttgtaggactggcagggtgcggtggctcgtgcctgtcatcgcacactttgggaggcagaggtgggcagatcgcttgaggtcaggagttcaagaccagcctggccaacatggcaaaaccccatctatactaaaaattagctgggcatggtggagggcacctgtaatcccagctacttgggaggctgaggcaggagaatcgcttgaacccaggaagcggaggttgcagtgagctgatacggtgacatggtgccactgcactccagcccgggcaacaagagcacaactccatctcgaaaaagaaaaaagaaaacttgtaggactatatctctgtttccaaaaactgttagttgcattcctatttttttttttttttttttctgagacggagtttcactcttgtcgcccaggctggagtgcagtggtgtgatctcggctcactgcaacctccacctcccggttcaagtgattctcctgcctcagcctcctgaatagctgggattacaggtgcccatcaccatgcttggctaatttttgtatttttagtagagttggggtttcgccatgttggccaggctggtctcgaactcctgacctcaggtgatctgcccgccttggcctcccaaagtgctgggataacaggcatgagccaccgcgcccggccatgcttcatttcagttcacctacaccccacactctgttccgaaaccccctaacaatcgtacccttccttttctcagccgccccatgggtctcctggagtgcagccccgtctttgcaaggaggccataaacctggctttgtgggctgcgggtctgtggtggggtctgttgcggggggtcctcgggctgactgggccgctgtatgtttctttcttaacttctgtccccgaagcgaggccacgaacttgctgcaggaccttgggcaaactacggacaccttgaagcctccacggcttcttgtgtggaacgggagggattgcggcatcttcagggcctggctgcaaccggtgtcctgggaccaccccaccggatgctcccacccgagcaggccaagatccccagacctggtcttgtgtcctccttccagaatgtggggccaggcctgcaatggagaagcccacccgggtcgtgggcgggttcggagctgcctccggggaggtgccctggcaggtcagcctgaaggaagggtcccggcacttctgcggagcaactgtggtgggggaccgctggctgctgtctgccgcccactgcttcaaccagtaaggcccgcctcctccaggaaggctgcccggcttcccctcctcaccagcccctccctgtcagaaaccatcctgctggggctgctgcatggaccccactggggagcagcccttcctctcctgagggcagctgagagacaggagggagccggtgccaaggcttctaaggacaaacagggcctaaccaggggagggggaggagggttccttccccattgcttgctacccaggcagcgtttatcttggagattcccaggcatggtggcccgcatctgtggtcccagctactcaggagcgtgaggcaggagaattgcttgagcccaggaggtcgaggctgcagtgagcctgatggtgccactgcactccatctggggcaacagagcgagaccctgtctcaacaaaaaagagactcataaagctgtagggggttgggggggggcattggcacaggtgtagaaaatgaagcctgagggtcccctgacttgtccgaggtcccccagcttgggatccttttcaggaggagcccagcagcccctctttccctggtcctcctccctggagccgaaggtcagaggatggtcctggggcccaggcagccctgtgtggcttcctgggggtgtgcatcagccctgtccctccccaagaaggcgggcatgtgctggagggcaggcatgtctgagggccctgtctccatagcacgaaggtggagcaggttcgggcccacctgggcactgcgtccctcctgggcctgggcgggagcccggtgaagatcgggctgcggcgggtagtgctgcaccccctctacaaccctggcatcctggacttcgacctggctgtcctggagctggccagccccctggccttcaacaaatacatccagcctgtctgcctgcccctggccatccagaagttccctgtgggccggaagtgcatgatctccggatggggaaatacgcaggaaggaaatggtgagcgctgccccatcgaggggaacggtggatttattctccagggcctggcctggggagggtcaggatgggcatctcttacctggaccctaaaccaattccactgcacagggacctctgtggctgatccctttgtctttggtcccgctgcccacacacctctcacttccccattccatctgggggcaaaatctggctgttgcctgtttgtataaacaaagttttattggaacaggggccatgttcacacatcaacagattgtctatggctgctttcctgcaatagcagcagagttaaatacttgtgacagagactggcccttaaagctgaaaatatttaattctctgaccatttatagaaaatgtttgccggcggccacatgtggtggctcacacctgtaatcccagcactttgggaggcccaggagggtggatcatttgaggtcaggagtttgagatcagcctggccaacatggtgaaaccccgtctctactagaaatacaaaaattagccgggtgtggtgatgcatgcctgtaatcccagctactcgggaggctgaggcaggagaattgcttgaatctgggaggcagaggctgcagtgagctgagattgtgccactgcactccagcctgggtgacagagcgagactcccatctcaaaaaaaaaaaaaaaaatagaaaaataaaaaattagccgagtatggtggcacatgcctgtagtcccagctacttaggaggctgaggcaggagaatcacttgagcctgggagttcaaggccgcagtgagccatgatcatgccactgcactccagcctgggcaacagagcaagaccctgtctcaaaaaacaaaaaaagcaaatgctcactggtgcttgcttgcgctagtctatcccgagacccctcccactccaacagttaatgcttcccttgacctcagaatggcctcctacaccttacccaggtgctagggcggcagccccatggggacagtggggagactcttgcgctctgagcgggccatcaggcccacctcctcctcactctgtggctttgtgagattcctgcaactctgtgagccctggtttcttcgtctgtggggtggggatgctgcatctcggggctgttatcggagcggaactggagctgctctgatgatcactgtgcacgtggcctttctggctctttccctggtagccaccaagcccgagctcctgcagaaggcgtccgtgggcatcatagaccagaaaacctgtagtgtgctctacaacttctccctcacagaccgcatgatctgcgcaggcttcctggaaggcaaagtcgactcctgccaggtaagcattcaaagggggaaagcgggcaatatttccatgaaatgcccacagccgttcacccagcagttctttgtgtgcagacctagatttttttcctttctttccttccccccctccttccctccttgtccttccctccttttcctttcctcctttccttccctccctttccctccctccctccctccctccctttccttccctccctttccctccctccctcccttcccttccctccctccctttccttccctccctggcctttccttccattccttccctccctccctttccttccctccctccccttccctccctccctttccttccctccctccccttccctccctacctttccttccctccctccctccctttccttccctctcctccctcccttcccttccctccctccctttccttccctccctggcctttccttccattccttccctccctccctttccttccctccctccgtttccttccctccctccctccctttccttcccttccctccctacctttcctttccttccctccctccctttccttccctccctccccttccctccctacctttcctttccttccctccctccctttccttccctccctccctttccttccctccctccccttccctccctacctttcctttccttccctccctccctttccttccctccctccgtttccttccctccctccctccctttccttcccttccctccctacctttcctttccttccctccctccctttccttccctcccttcccttccctccctacctttcctttccttccctccctccctttccttccctcccttcccttccctccctacctttcctttccttccctccctccctttccttcccctcccgccctctccttcccttccctcccaccctctccttcccttccctcccgccctctccttcccttccctcccaccgtctccttccctccctccctttccttctcttccctccctccctttccttcccttccctccctacctttccttcctttcctttccttctctctctctctctgtctttctctctgtttctttctttctgacggagtctggctctgtcgcccaggctggagtgcagtggtgcgatcttggctcactgcaacctccgcctcccaggttcaagcgagtctcctgcctcagcctcccgagtagctgggattataggcgcccgccaccatgcccagctaatttttgtatttttagtagagacggggtttcactatgttggccaggatggtctcgatctcctgatgtcgtgatctgcccacctgggcctcccaaagtgctaggattacaggcgtgagccactgtacccagcctagatttctttttctttttccttttttttttttgagatggagtcttactctgtcgcccaggctggagtgtagtggcgtgatctcggctcactgcaacctctgcctcctgggttcaagtgattctcctgcctcagcctctggagtagctgggactacaggcatgtgcctccacgtccagctaatttttgtatttttagtagagacgtggtttcaccatgttggccaggctggtctcgaactcctgacctcaggtgatccgcccgcctcagcctcccaaactgctaggatggcaggcctgagccactgcacccggccatagccaccatgcccagatttctgaagggctcaaccgtgcacacacagacaggttaattttcaggctgggtgcagtgcctcatgcctgtaattccagtgcttcaggaggctgaggtaggatcagtcgaggccaggattgcaagaccagtctggacaacatagtgagaccccgtctctacaaaaatttaaaaaaaaaatttgtcaggcagagtggcaggtgcctgtggtcccagctccttgggcagctgaactgggaggatctcttgaggccaggtgtctaggctgcagtaaactgtgatcacacagctgcactccatcctgggcgacacagcaagaccctatctcaaaaaacgaagggcgggtgcagtggcatgcattttgggaggccgaggcaggcagatcacctgaggtaggcagttcaagactggcctggccaacatggcgaaaccctgtctctactaaaaaactacaagaatttagccaggcatggtggcgggtgctggtaattctagctactccggaggctgaggcaggagaattgcttgagcccaggaggcggaggtcacagtgagccgagatcatgtcactgcactccagcccgggcaacagagtgagactccacctcaaaaaaaaaaaaaaaaaaatggcatcagatttcaatagtaactctcaaagttagatgccattattactaatcaatacaaaatatcaatgacagtgtaaatgcccattcacacacagtagttaaaaggaaggtggtaaataacctgcaatgggaacctacccagcccaagttcttcaatcagacttctgagttcaaatcctgcttcaactactgtgtgaccccaggcaagtgccttaacctctctgggactctgatccccatatgtaaagtgggaagcatagcaatgcctgtcttctaggagtgttgtgagatcggtgtcttgcatagtcttttcttcctatatattcattatatttgttctttatatctgacaataaaaatagaataataggtatttatagtatctattattatactatttattctctatataaatgggcgattcacaatagttagctttttatcttgaaaagaatgttgaggccaggccaggtggctcacatctgtaatcccagcactttaggaggccaaggcgggtggatcatctgaggtcaggagttggagaccagcctggccgacgtggtgaagcccccatctctactaaaaatacaaaaattagccgggcgttgtggcttatgcctgtagttccagctactcgggaggctgaggcaggagaatcacttgaacccaggaggtggaggttgcagtgagccgagatcatcccactgcactctggcctgggcaacaagagcgagactctgcctcaagaaaagaaataagcttggcagctagtggtcaggggctacttctagatggtgggactattcatggctgttattgttgttatttatttatttttttttttgagagggagtcttgttccgttgcccaggctggagtgcagtggtgcgatctcagctcactgcaagctccgcctcccgggttcacgccattctcctgcctcagcctccctagtaggtggaactacaggcgcccaccaccacgcccagctaatttttgtatttttagtagagacggggtttcaccatgttggtcaggctggcctggaactcctgacttcatcatctgcctgcctcagcctcctaaagtgctgggattacaggcgtgagccaccacgcctggccttattgttattatttttagagtttttctgcattgttttacctcctcaaaacaaaagcaagaatgatggaaactcagagaggagaagtgactcactccaggtcacacagccaggcatggggctgcagtcaggtctccagacccgcgctgtgccctctgccccccgccctcgatggctcccacccactgtaggaacgcaggagggtatggcagtgctgggaagagagggtccctggaggaccaaccagtgctctttccttcctttctagggtgactctgggggccccctggcctgcgaggaggcccctggcgtgttttatctggcagggatcgtgagctggggtattggctgcgctcaggttaagaagccgggcgtgtacacgcgcatcaccaggctaaagggctggatcctggagatcatgtcctcccagccccttcccatgtctcccccctcgaccacaaggatgctggccaccaccagccccaggacgacagctggcctcacagtcccgggggccacacccagcagacccacccctggggctgccagcagggtgacgggccaacctgccaactcaaccttatctgccgtgagcaccactgctaggggacagacgccatttccagacgccccggaggccaccacacacacccagctaccaggtaccgggagagacggagggatccctgggagtggagggtcccatgttaatcagcctgggctgcctaacaagacataacgtcgtccactttgggaggccgaggcgggcggatcaagaggtcaggagatcgagaccatcctggcgaacacggtgaaaccttgtctctactaaaaaaatacaaaaaattagccaggcgtggtggtgggcgcctgtagtcccaactacgcgggaggctaaggcaggagaatggcatgaagccgggaggcggagcttgcagtgagctgcatgccactgcactccagcctggcaacaagcgaaactccgtctcaaaaaagaaaaagacataacggcctctctggctgggcgcggtggctcatgcctgtaatcccagcactttgggaggccaaggcgggtggatcgccagaggtcaggagttccagaccagcctggccaacatggtgaaaccccatctctacaaaaaaataaataaaaaaagccaggcatggtgacaggtgcctgtaatcccagctacttgggaggctgaggcaggagaatcgcttgaacccaggaggtggaggttgcagtgagccgagatcgtgccattgcactccagcctgggcaacagagtgagactccagctagataatagtaataaaaataaaaagccaggcgtgatggtgcatgcctgtggttccagctactggggaggctgagacaggagaatcatttgagctcaggaagcagaggctgcagtgagccgagatcatgccattatactccagcctgggtgacacagcctgtctctaaaaaaattaaaaaaaaaaaaaaaaatgaaagcagggactttgatggttcacagctgtgccatgtccttgggtgcgtgtttcttgctaacttggcagctgccctcatgtaggtctgtccctgcagcctgggggctctcactttctcagtctcagctgattttgactttttcaatagctatggcgtgggatctctttgggcccaaaagaggtggagaaggcccccctcaaaatacaggcgggttctgtgtggaggtagctggtgttcccaaggacagcggctgcggctgctgtcagattatccaaggccacctggtcttatgtcagggccagacggtgccaaggctggtggggaactggcatttccccttactggccttggtagctgctgcgggttggatggcggttggtggggggtggggggcgggggggacccagggaagccagctgggtggtgatagagggcggcgggggggcttgcccctgaggaggaaaacacgcctctggagacagcaggtgggtatgggaccccctccatgggtggtaacagggtccctgaaaccccctggaaaccacccacgtgttctttccacagctgggttctgaggaaggcctttgcgcttggcaccgtctggggagggcttggaggtgatcagggatccaggcagagggcaccaaggcagggctggggcctctggggcggggccctggtgtgtgcaaaggccttggggtgggagggaactcctggaagacggagatgtgggaggctgccatgagaggggcctccggcaggggaaacgtatggtcccaaaactgaagtcataggaaacaaatgcatttccaatgttatttgagaaaagcccaaagaccaagcagcaggcccagtgtcctttcctgctgagttttcctgggataggtcccccatcacaacctactccctggggctcccagggggattcgtggagaggcggcgcccaggggggccttcgtggaggaggtgccctgggtccgcctgcccacgcgcctggctcccccgcagactgtggcctggcgccggccgcgctcaccaggattgtgggcggcagcgcagcgggccgtggggagtggccgtggcaggtgagcctgtggctgcggcgccgggaacaccgttgcggggccgtgctggtggcagagaggtggctgctgtcggcggcgcactgcttcgacgtgtgagttccaaacgctccaaatgcccctacatgtctctgtagctcacccggaaccgaactgttgcccgaaaacgcaccctgaccccctcctttgccgggagtgccctccccaaccccggctcccactgccccaggccactcctcccaccccccatctccccatcctcgctccctgcagccctcccctgaccacccaccccctagcctgaccacacggggctggggctgcgaaggccgagtcctaccccgcggtccccacctaacccggaagctgcggccccccccctccagctccaggctaagcccacgggaacattggggtcacttctttccccagccctcgcccctgggacttggctccagccccccaaagcccacccagtagaaagctgccctccccagggcccaagccctggcagtcgaggggtccggttttccagaggggacacccagctctgggctctgcagggctggaggtcagaaggggagggcaggcggggggcgggactcgcacggccactagaccccttttcagagcgctcatattaggtggtgacggctgcagttcccggtgccgcctcggtgcctgatgggggagactgagcccattcccagaccgacagccagagaccaagaggccaataaccctgcccagggtgccagccggccgctgggggacaccacaggggcgggggccgggggcgtgggggctcgggccgacgcctgtcctcgcgcgccccgcagctacggggaccccaagcagtgggcggccttcctaggcacgccgttcctgagcggcgcggaggggcagctggagcgcgtggcgcgcatctacaagcacccgttctacaatctctacacgctcgactacgacgtggcgctgctggagctggcggggccggtgcgtcgcagccgcctggtgcgtcccatctgcctgcccgagcccgcgccgcgacccccggacggcacgcgctgcgtcatcaccggctggggctcggtgcgcgaaggaggtaggcgcgcccggggccgcggtggtgcggggctcggggggcggccggacgcggtccccacccgccccgtctcgctcgcccgcccgcaggctccatggcgcggcagctgcagaaggcggccgtgcgcctcctcagcgagcagacctgccgccgcttctacccagtgcagatcagcagccgcatgctgtgtgccggcttcccgcagggtggcgtggacagctgctcggtgagccccgccccggcccaggggaccaggtcccgcccagccgccggggagggcgggttcccgctgccacgaagcccaccatccgggagccaccctccggtgcaggcttctccagcggatcaagcagggagcctttttggctctggaggaatttccactccacagccgtttattgggcaacccaccgcatcccatccccgggcctcggcggcagagcaggcagaggctgcagtgggaggcaccgttccactccgggaccacgtggcgggtgtccataaatgtctgccacctttgcattgagcccattttccagatagtgaaaatgcggctcccaggggaagtcactagggtcactcctagaggggccaatgacccaagggctgctgtaggggaggtaccggcctctgaaccccctttcttctctccccaacagggtgacgctgggggacccctggcctgcagggagccctctggacggtgggtgctaactggggtcactagctggggctatggctgtggccggccccacttcccaggtgtctatacccgggtggcagctgtgagaggctggataggacagcacatccaggagtgaccaccacgtgactgcccaggccgagactctacgtgaaagcaacaggagcagcaggccacccaacaccccaccccaccgtaccctacccaaggacgggtgtgggggggctgtgggtcatggggatgcattttggtaccaccctttgttccaataaacacagcccctccaccctagctcactggctcagcacctcagtgtcacagcgaggaccacctgcctggtgctccaccaggacccggggtggaacgaagcagggtcaaagcaagccctgacaaggggaaggctgtcccccttagcctttggggcaggggtggcagcagcaacacattcctcgtgactcagcagcccggtggcactaaggggaaagatggacttctcccaacccaggggaggctgagaccctccgagctggggttccagggacacgcgtcacctcttcccagagacccctcaggagggaaataaagaggtttctctccgtcctccaccaatttatttgcccatccgcaggaggtgacagctcctgtggtgtctgaccacccccaactccgaagtccagacaagctgtccgcccagaatatgaggctgacttgggcacactaggggaataccccaaaggcctgaaggaggtgccactgggctgccagcacttcaggaaggcacagggccccacacccccgagatccaagctgcactggctggcagggggcagggcggggggtggcgaggacacagtcccgtgtgtcccagcaccggtgccaccctcctaagccccgggcaggcagtacgtacatgcggaccccgcctctcaaagcacgtttatggaaatgaacagggtggggtggcccgcgctcgccggtcacatgttggctcgttcccgctgcagccgcgagttgtaggcgcgagacacggtgttccaggcgtccatgtagcggtccatgcacatggcgatgcacttctgcgggagcggaggggcgcacggctcagctcgggacttcgcggccccggggaccgccctgaccccggctccaggacgcccgggctgcagactacgcacgtgcagtgaccactccgtcgcacctccccgttagtctgcgcacgcgcagacacctcccccctcgaatctaggccctcgcgacccttgccccgaacctccgcgggtctcacctgctcggagttgtccagggagcccccaggtttccctatacacttccggaaacacttgtccgtcatcctctgtggagacacgcgaggctttagccgcgacgtcggcccccaggggtggccctgtcgcccccagcgcccgtccccggccagccccgcacctgcagcagctcctgcgcgttggccacggcgatctgcactttcacctgctccattatgagccctgggtccagcttcccgctgccggagcccccgaaatcggagccgaagccgccctccatggctccgcaaagtcaaccggaccgaggccgcgtgcgccgactcgtaactaactgcgccggaagcgggccgcccggggcaccacgggaaacggagtccgcgcggacggggacggaggactacaactcccacacgaccgcgcgcgcccgggccattcaaggtcgcgcggggggccctccgctcatgcggaggcctggacctgccgttacctacacgagctacccgtggttgcgactccgcgggaagagggaggccctgacttggccggggagtaggggggctactacgtgcggccgaggccgatcactttgtactcacgctctgcctccagctcgtcccgaagggcctgccgcgcatgcgcacgaggcacccggcgcgtctatacagcgtgttgccgccggggcggagcccggtcgcatcacgtgacgaagagtcagcttgtgcaacagcgtcggaggctcactagaaaaaaaagggcagggtcccatgcatcgcctgggtcctgtttacactagctacactagccagtgacctttttccttgggggtggagggatctttcttagacatccgcttcattagggcagaggccccggctcgagcttcccctcaggaataaactcagaggcagaacctaaaatcaaaatgtttattggagtgttgtacaaaaaagtttccagtcataaaatgtatattacaaatcattggaaaaaaaaaagaacacattaggcatgcatcttcttaaaaaccgaatctctgaaatgaaagtccatgccagccccagctgcagcccagctccgtttttgcaggttgtgctgtgacgctcgctggacgcagggcttggaagaggctgcaggcggcgacgccccaggactgaggagtccctcagatctttaacaaagaactgccgcgtgcaggcttcagaccaaccccagccaaagccgctggcatgaggacaggtgcatgatcggattctgggtcagcccgcaggcctcccggctcctgggctcagcggggcaggcttcagcgttaacctggcgctgtgcaccccagaacccgcgttggtccagcaggcgtgggcctccccccagggctgggtggcgtctgatgcttcgcagggagggcgctaggcttcgagtcacacggcacgggcttacacagagggatggtttcgcatcgttctaagcggcacacagctaagcgtatttggggacaaatgcaaattgtttcccaggccataaataacttttaaaaatttgattttcttagtgtttccaaagactcaattctcaatgaacctccaattacccacaggctgcccagtccacgcttctccccacccccttcagctaagggcacccgcagtcctaggaccacccccagctccacccaaggcaaatgtagggtggggggttctgtgggcctggggcgtgctgttttcaggacaggactgggcagcgtctggacatgaggacctgcgggttttgggggggactttgtccctgagcccagcctgcaaggctgtcggcaaatcacagaccaactccaggatacagctttgctcctccagagccaaaatacataggatgtggctgagaccactgcagactccccataggacaagatcaccaagacccacccccagaaccctcgctagcacgaagcccagccagtcgggtccgggtgattcctgctatgaaggtgggaaagaggacacagtctgtcgccagcattcccacttccagcggctggcagagggtatccccggggcaggcaaagctccctaccagccgcctgactgggagcacagcggcgtagcctccaggaggaaatgctttggtaagatgcgcccccctctatctacatgggaccgggacttctgagagcaaggacagcgagcaggggctacgtggagcagcgggtgtttctgctttgtcggccgctggctccttcccggcctggggctggggccccccattccttcctgccacaggcaggtccccagggaggcgggatgcagtcacaggggagcggtgccgcccccgccctgcagtgaacgccatggcccggagacggcgcgtgcccatggctcagttttggtgtctttaagacttgagctgcactttctgaaggaggctctgccgtcggagggtgccccagccccacgccaccccggggaggagggtcagcctgtcctcaaggccctggcgtgagctcctgacctgtgtactgaccaatgtaaaaaaataaatatccattaaaaaaataacttctgtgtatctatgagggagggtgtaaacggtgagctattgccgaaggggggtgccaggcattgggaagctggactgaggggcttgggtgcgtcgtgataggagtcaggtggccttggcctgtctgagaaacatggtttcagcgagaaaatcacagataaaagcacagtatggatagacgcatgtgtatatataggcacagggcagacggagctggaacacgggaggggctccacagcgctctcctccagagggtcaacatggtggcgttccctgcagacagctgttctgaaactcacagcttctgcctccaaggcaaccagatgtgtcccctccacatctcccctccctgcttattgttgtgacaggtcttacgacgggactgtcctcattcttccttccccaggtcttcccctcccctgccctgttggccttgcacagtcaggaactgaactgcgggaaaactcccccaaataaagtcaacggtccgagaaacccggccggtgcgctgccagaacgggaatctggaagcccaggcagcggagtgaaaacccgccctgggggccacgccatccccatgctggcccacacccgctgcgtggctgcctgaggagttcccgctgtccgaagctgggcagccagaatgcaggcttggccccgggccccaccaggtcgacgcctggattctgaatttggttttgtagaaagccttaaaaaaacccaccaccactgaattcctacgcagtttccgcgctccgtccgcagcagggccgtctcctgtcccctcgctagcctcgccggccctcctccctccaagcccaagcatcttctaaacctccgggtcctggccctgggcttccaatttgaccaaatggtgagatgaggagtggggtgggattgaaaagtctccggggcagcggcgaagtggcagcgaagtgaggctggaggagacccgccaggagggagggctgggggagacccacccacacgttctggcagttcgcttagaaattctctagaaatgtatcaagaactaaagaaagccaatgatataaaaatagttttcagtggctctgggtaaagaaaggtgtgtggatgaggagtgtgggttcacatcacgtagcagcctcttgaggtggtcctcgggtccccctgcaggaaggaaggaaggaaggtcggccatgatcagggccagcctggaggcagccggcaggtagatggctgcccccacctccccaccagggaggggctgagcaacaacagtgtctatttctagagccttccattccacttccatgtccccatgagcccgcctgtgagctacacattctgttctgggttccaaaacagtcacaggaacttgcgacgcacgcgtttaatgcagctgtggtttctgcactcatcttctccccagaagccagtattgaagggacctgtgtcttcgactgaggaagccggttgaccagagagcatttggggagctgttcaacacccacctctcaggggaccccctggccagctaccctgaggtctgtgatgtcgcaaattcacacgatgggcacgacccaggaggcaagaacaggtctctgccgtgctggtaacagccaaggctggcttcaccctgagccacggcagccagatggagctcccgtcggggatgcggccagcacgcatgtgtatgtgtgtgcacgagctcactctgccccagaggctgccccccagccgcaagtgggcacaggggtcctacctgttggtggaaaagatcctcctcgccaaactcggcttcctcctcctcttcctccccattctcattctcacgcatcaccgaggacttcttcacagtcctcatggccacttcctgtgcgggacaggacacggcggcatgtcccgggatcgggcccagagctgctgtggcggccccgagggtgcccagaccctgcccaggactccagccgagcaccccccaagccacacacacccacctcgccatccgcgttaaccaggacggtgcggaagctctcgcccgtgccccagctgctctggcccttccacaccagcgtcgagggggggctgtgggccacccccgcaccagctgcccacacctgaggacccaataacaatggccccatcagggtcacctctggttccagggacgtgggccagccagtggcccctaccacaaagcccccttcaatgccctgggcgttcagtccttccagcccgacgcaggcttatccagggtgatggtccccaggatacacaagaagagaccagggttcacagaggccaagggctcttggcaagcaggggctgaactgggatctgacacccaccaggctccatggcccatgcgcctgactgttaacacttcacggggacgcctgccagccccagcagcctggactcagacccagggcacaccactcaggctccagggaggcccagtggggtgacaccagcacatggaggttctatgactgcggcagccgctctgagacggtgcctggtgccaccatcatccccacccacccccgccaagtcctgtgcctccagtcccctgaccccacctcacaccccatccgtggccaccctcgccctcctgccccaccacctaccgtgaccatctggccggcgcgcaggatgtacttgggcgtgaacttgtaggcgatctcctccccctccaagacctgcctcttgattctccagttccccagagactgatcctggaagacacggcacacacctgaccctcagccaccaggactgtgacaccgcccccatcgccctggctggtggccccatcaccctgaccctggtcacccccaccagctaggtcaccccattacccccatgccctggtcattccagtcaccttgtcccctgcctcgtcctgaccggcggccctgtcaccctgaccctggtcacccccatcagctaggtcactccattacccctgtgccccggtctttccagtcatcttgtcccctgcctcgcattggccggcagccccgtcaccctgaccctggtcaccccatcagctgggtcaccccgttacccccatgccccggtctttccggtcaccttgtcccctgcctcgcattggccggcggccccgtcaccctgaccctggtcaccccatcagctgggtcaccccgttacccccatgccccggtctttccggtcaccttgtcccctgcctcgcattggccggcggccccgtcaccctgaccctgatcacccccatcagctgggtcaccccgttacccccatgccccggtcattccagtcaccttgtcccctgcctcgcattggccggcggccccgtcaccctgatcctggtcacccccatcagctgggtcaccccgttacccccatgccccggtctttccggtcaccttgtcccctgcctcgtattggccggcggccccgtcaccctgaccctgatcacccccatcagctgggtcaccccgttacccccatgccccggtcattccggtcaccttgtcccctgcctcgtattggccggcggccccgtcaccctgaccctgatcacccccatcagctgggtcaccccgttacccccatgccccagtcattccggtcaccttgtcccctgcctcgcattggccgacagccccgtcaccctgaccctggtcacccccatcagctgggtcaccccgttacccccatgccccggtcattccggtcaccttgtcccctgcctcgcattggccgacggccccgtcaccctgaccctggtcacccccatcagctgggtcaccccgttacccccatgccccggtcattccggtcaccttgtcccctgcctcgtattggccggcggccccgtcaccctgaccctgatcacccccatcagctgggtcaccccgttacccccatgccccggtcattccggtcaccttgtcccctgcctcgcattggccggcagccccgtcaccctgaccctggtcacccccatcagctgggtcaccccgttacccccatgccccggtctttccggtcaccttgtccgagttgttcttgagctgcacaaacttgccctccaggtcgatctcctcgatgctgacgctacccgaggccgaggcctgctgggccaggtggaagccaccgctgccacccgtgcccgtgcccaggacgcttgggccgctgcccaagggctcctccacctccagccgcttccgcttactgcggcccaggcgcccggtggcggacaagctgccgctgctgctcgaggtggctcgtgagacggtgacgcgcgaggatgggctgggggacagcttcagcctgtggggaaggcaaggaaggtgggactggtagtgggagccccagacagcccagggcacgcagagtggcggccacggcccggccccacctccacccctgcccagcactccccgcagccccgtcccgcctctcctcctgccctgcccctcctcctcactctgtgctcccaagcctcctggcctgccgcacctctcctcctcgccctccaggagcttccggtaggcgttgatctccatgtccagggccagcttcacgtccagcagctcctggtactcggccagctgctgctgcatcacgtcccgcatctccgtcatctcctgctccttggcgtccagcatcttccggaacttgtcccgctccccggccatggcctcctccagctcccgaatgcgatcttcagcggcactggcctgcggagggggcgggtggcgaaggtcagggcagcccatgggtcacaaggcccaggtgatcctgggactgcgggagatgggccctcaccacagactggggcagagaccaggcctgggcatggggcgcacgggaggggagggaaggggcatcgctgggcgccccgagggctgcatccgatgccaagaggccagagccccacgccccgcacatccagggcagggcccagaagttgggccagggggacggcagacggtggcgctgtgctcatcacctgcttctggaggccggagagctggtagctgagggactccaggcgcatgcgggcctccttcagctcctcgcgagccgcactggccgccttgtcgttctggtcagagctcagcttggcgctgtccagctgtggggagacgggcgggtgagtgcgggcgcggggcggggcggggttcccaccggccgcccccgcccacccgcctgccggccacaccttggcctggtaggtctgctccagctccagcttgtagagccgcacttgctcgtcgtgctggctccgcagctcctccagcgcctgtgccatcttgaagtcgtactcctgctgccggctgctgtccacctccaccaggcgccgctcgtgccgccgccgcgtctcccgcacctcctgcggaccaaggcttcgtgaccctctggtcccgcctgggccccaagcaccaggcccaagggagggctcaaaaatgtgccaagaggaacctccaggcaattcctggttccttgtgcacaagttacaaaccgatacacgtgcaggtgagaggcgacccaggggccgtccacgcgctagaacgtgactcagccacgaaaaggagcgaggctctgacaccgccacagcatggatgcaccttgaggacgtcacactcaatgagagacgccagacacaaaaggccacacggtgcgtgatcccatttccatgaaatgtcctgaaatgtccaggacaggcccatccacagagacagggaggggatgcgtgggggccagggctggggactgctgatggggagggggttctttttgggtgatggaatgttctagaattagaggtggtggttgcacaaccctgtggagatcctgccaatgctgaactgtacactttaaaaaggtggacttaaaatagccaggtgtggtggcgggcacctgtggtcccagctactcaggaggctgagacaagagaatcgcttgaccttgggaggttgcagtgagccaggatcgcaccattgcactccaacctgggtaacaaagtgagactgcgtctcaaaaaaaaaaaaagtgactctctcttataaaagccattattgaagaaagcgggccaggcgtggtggctcatgcctgtaatcccagcactttgggaggctgaggcaggcagatcacgaggtcaggagttcgagaccagcctagccaacatggtgaaaccccatctctattaaaaatacaaaaattaggccgggcacagtggctcaagcctgtaatcccagcactttgggaggctaagacaggtggatcatgaggtcagaagttcaagaccagcctgacaaacatggtgaaaaccccgtctgtactaaaaatacaaaaattagtcgggttggtggcacccgcctataatcccagctactcaggaggctgaggcaggagaatcgcttgaacccaggaggcggaggttgcagtgagctgagatcatgccaccgtactccagcctgggtgacagagcaagactccgtctcaaaagaaaaaaattagctgggtgtggtgctgtgcacctataatcccagctactcgggaggctgggcccagtgtgggcaacagagcaagactccatctcaaaaacaaaacaaaacaaaacaaaacaaaacaaaaacagtagaaacgcttctgaaggaagctggccacctttgcagtcagcaaggcgggtagcccaggcaagcagagccctgcgggccgcgcacccacctccacggccgccctcccgcctccacggccgcgcacccgcctgcacagccgccctcccgccttcacggctgcgcacccacctccacggccgctcacccacctgcactgccgccctcccacccccacagccgcgcacccacctccacggccgccctctcgcctccacggccaccctcccgccaccacggccgcgcacccacctccacggccgccctcccgccaccacagccgcgcacccacctccacggccgcccttccgcccccacggccgccctctccaggactccgcaccctgtgggctgcacaggcctgcatcatcaagctccctaccgcagctccctgtgagggcccctccagggcctcttcccggcccctgcaccgccttcgtgggtcttttcccaggtgccctgtgggttccacctggggcacgttcctgggcccccgcacagaagctctcgtgagtctcttcacgggctgtctcacaggtttccccacaggccccttcacaactgccctggcggcctcccctctggctcctgtggggccccccccactccctgggcctggccagagcggggcgcagctcctgagcggcctggacatccctccaccagcagccagcagctctccctgggcagggagtgtgggcccggccggccccggcattccaccctgcactgtgacagcacaattggttctaaaggacacaggctgacgcctttcctccccactcccctctccgagcccccggaggcagaggccccaggtgaggggctgcaggtcagggaaggaggctgggtggggagagcgggcctcaccctcgctttggacaaggaggccctgtgggaggctggacggtggcacccagaagatgcacctgacgcctgcctcatggtctagcagttaggatcccaggcggccagggttcagctctcagggtgggaacaccaagcttttagaaaggcaagaaatcaaaatagaccttccttgacactgaagagatatgttttggctgggcatggtgactcacgcctggaatcccagcagtttgggaggccgaggcggatgaagcacctgaggtcaggagttcgagaccagcctggccaacgtggtgaaacctcgtctctactaaaaatacataaattacctgggcatggtggtgcacgcctataatccagctactcgggaggctgaggcaggagaattgcttgaacctgggaggcggaggttgcagtgagccaagatcgtgccaccgcactccagcatgggtgacagagtgaaactccatctcaaaaaaagacgtgcccacatcccgatccccagcagctgtgaatggaccttatttggaaatggggtctctgcagatgccattaggtcactctggatgatccaggcaggccccaaatccaatgacaagtgtccttgtaggatacacagagtatggacacaggggaggcagccgcgggaagacagaggcagacactggggagacgcagccgaagccaagggcaccctaagaggcaggaaggagcctccctagagccgtgggagggaccccggccacacggtgccctcaggcttccgccctccacagccatgagggtggactttgcgtttccgctgtgccaggctggaggccaggccactcactcacctcctcgaacacactcttccggaagtccagctcctcctgcaggctctggcagcggttctccaggtccacacgcatcagcgtctccttctccagctgctttttggccactgcatgaccgtcctcggcctgggagacacaggacagcgagctggtgtgacaatctgtctgttgcatataccctgctggggcgtcccgtggctcctggcacctaccttggccagctgggcccgcagctcagccacgtcactctccaggccgcgcttgtcgctgagggcagctgccagctccacctcgctccggtggaacagggactccaggtccttcacacggccctgggccaccgtaagctcgccctccctcttcttggcgctgaaagtcaagagggcaagtgagtggggaggggcaaggtccatggggccacagggagcacctcagggggcgtcaggcaagcccaaagacaaggtcaccgaggcctccgagccccagaccttcccgtcctgcagacgacgcggccccacgcgcccaggcaaaggcacacgtgccctcatcatctgccctgcactgtcaggagtccagcaagtgacaggcaccagcgcttgggaccaccctggaggcatgggctttcccagcctctcctgcctgttctggacccaggacgaccatttggggagaaattaatgcatcctctgtaaatgttacaaagaccctggcctttgaagggtcagccttgtttgtaaacttaagctgtctgaagcaggctcacctggttttccactaaaccaaattagctccaacattagatatttaagatagcaaatactcaggctttttaaacacacaaatactaccagtgtggattgtaggcacttaagcttttttttttttttttttttttttttttttaagagacaggggttcacttgtttgcacaggctggtctcgaactcctgggctcaaggaatcctcctgtctcagcctcccaaagtgctgggattacaggtgcgagccaccgcgtacggctgactcttaaatgtttttaagcataattataagtcttggagctgaattttaccccctcccgacagggaactaactatatcctcccaagaaacagtgaggacacccagggttccgcagcgtcacaactgctgacatctggggtggtcttgagtgagggcacccagggttctgcagcgtcacaactgctgacatttggggtggtcgagtgaggacatccagggttccgcagcgtcacaactgctgacatttggggtggtcctaggcactgcagggtgctgagcactgtccctggcctccacccacttcagaccaggagcttcttgctgcccagttttgacaaccacaagtgtccccaggaatcacccagtgtcccctggggacagaatcaccccaggatggggacaactgggtgtatctggaataacacagccaaggctgctggctggacattcaaagaacatccacatccaggcggctcgagcccgtggccagaggtcagaagtgacagggacctctcctgcccagcagaatgcactcccgactctccctagagcctttttttttttttgagttggagtttcgctcttgttgcccaggctggattgcaatggcgtgatctcggctcactgcaacctccgcctcccgggttcaaacaattctcctgcctcagcctcctgtgtagctgggattacaggcatgcgccaccagcgtccgctaattttttatttttagtagagatggggtttctccatgttggccaggctggtctcgaactcccaacctcaggtgatctgcccgcctcggcctccaaagtgctgggattacaggcgtgaaccactgcgcctggtcccccagggcctttcaaaagaccacctaggcatttgcccaagaaatgaaagtgacccatagctgaaagtgaccgtatgtctgtctaagtatatctccatcaataactgtatttatctatataatctatgtccgtatatatcaattctacagatggctgtatctttttttttttttttgagatggagtttcgctcttgttgcccaggctggagtgcaatggtgcgatctcggttcactgcaacctccacctcccgggttcaagcgattctcctccctcagcctcccaagtagctgagattacaggcaagtgccagcacgcccagataattttgtatttttagtagagacggggtttctccatgttggttagcctggtcttgaactcccatcctcaagtgatctgtccgccttggcctcccaaagtgctgggattacaggcatgagccaccgcacccagccttacagatagctatatctatctattgctctatctattactgtctatccatctacccatcatccatccatccatccacccatcatccatccatccatccactcatctgtccatctatccatccacccatcatccatccatccatctactcatccatccatcatctatccatcatctccatccatccatccttccatccatccctcaatcatctatccattcatccatctactcatccatccatccatccatctatccactcatccatccatcatctatctatccattatctatccatcatccatccatctactcatccatccatcatccgtccacccatccagccatccatccatcatccacccatctccctctctctctcactagctgccaagctctcactctctgtgggactcttccttccttccttgtgtgacccggggagggagggctgccttcccagctcacagtgccctccctgcctaggatccgtaataaatcttcaaacttgtttcctatcgctgtgctgaatttgcgccttctgtcagaagaaccaggagctgccccaggctgggatcccagtgccagagcgatggtcggacaggcataccctggacacaggtcagacacgagctacggggcagccactgtgtaaacaggtctctcgtgtgaggggtccctggtcgggggtcagacaaccaggtctaaggccacctgccaggtaaaagcatccgtgccgggtaccctgaatcccgggtctggctccggttgtgtcccgccagggcagggcggccagccgctctggcgctggacctggtgtagccagggctctccacacactagaggtgtggcatctgcttgcttttgagaggcgtgaaggccagagacttcggccacaaggctgatgcacccctgtccgcagccctcagggacactaagctctacttccccacatggagcagatctccagcagggtctggggtgcagatcccgcatctctgagcacatgccacacaggccaggccctttcgctcagagggctgcgagccctgcggccctgctggggatttttgcaggggtttgggggaaggtggaatctgttgggcaaatcccgagtgcccgctgtgtggaaggcaccgctctcacaccagaggtgcatctagaacccttgccttacactgcgggacgtccttgcggagggaggcatcagcgacacaggctgcctaccagacaggaggttgcctgggggcagggctggagtggggctgggagacaaccctgggggcagagacctgaaggagcagtgctggaggagccagggccaccgctgctgaaagagccttccaggcaggcgagcagcagtgcaaaggcccaggggtgaggtggaagaggcaggctgcagaccagctcagaggactggagcggagatcggggaatccgggaagctcctcagcaactcggtctaaaccacagggttccgcaggactgcagggcacacccagaaggcagggtgcgggctcccagggctcagacccgtttcctaagcgccaggtgctgagttagaatcttcagctgggtgcccggggttttgtggcaggctctggcttgttaggtcctgcacgctgctcccagtgtttctctcattgtggggttttggagataaatttgttaggataagaaaaacattaggcttggcccagtggctcatacctatacccagtgctttgggaggctgaggtgggaggatcactttagcctgggagttgaagaccagcttgagcaacatagcgagacctcatctctacaaataataaaaaaattaggccaggcatggtggtttacatctgtaatcccagcactctgggaggccaaggcgggtggatcgcttaagtccaggagtttgagaccagcctggccaacttggtaaaaaaattagctgggcaaggtggtgtgagcctctaatcccaactattcaggaggctgaggcaggagaatcgtttgaatttgggaggtggatgttgcagtgagccgagattgcaccactgcactccagcctgggtgacagagcaagactatgtctcaaaaggaaataaataaaaaataaaaaaaattagttgggtgtagtggtgcatgcctggggtcccagctactcggggtggggctgaggcaggatcacctgagcctgggagttcgaggctgcagcgagctatgattgtgccactgagctccagcctaggcaacagagaccctgtcttaatgaaaaggaaaagacgggcctctctgtagatgccacgcactgctcaggagattgtgaactgggaattcctcaacacctagggcgggcactgtgtaccattttctttttttaatgttttaatttgaggtgaaattcacatcctgtacatttcaacatcttaaagtgaacagttgagaggcgcctggtgcggggccagcagcagctctgtcccatctgcacggtgtagttctgacatttcagagctccgtgcacccctgaccaagctctagtcatcccacagcctgcatggctccactgatgaacctgcttattaaacacggtgggtgctggaggtagacagcacagagctgctgcctgagcaggtcccggggtgcacctgtgctgtgtgggatgtgctgagagtgggcagcctgtcctggctggtgcctggccccagggtccccggctcatggccaccatcagggcacaaatggtccctcctggagccccaggccccgggcaggcgggcggtggtccctgggctgacctggagggtctcctgttggggaagggaagtcagctctccacgggagcagcgccagcccaggaaggaggagggcgtcggatggagaggtcacctgcaaccacgcatgggggccccggcactgttggacacagggtccccggtcattcctctggccacactccaactcagggacaacgtggattctcaagccactggctgctgtcacccccgtaccaggtggccgaggtgccacccctcctgccagcagatccctccatgctgagccaggcctgcgtggctctgggagaatgagcagtgtgggaagaccctgacccaccccagcctgaggaaatccgaggcacctgcaggtgcctgaatgccggtggccggagaccacggaagacagtgtccacacgcagggcaccagagacctcgctctagctggagcctcacatcaagaaaagccttgagctcagtgtttcattggcctcctggctcctctgaataaatattccttttgtcatcatcgttctgtttaaattgccgcccaaccacatcccacgcccagaatcaggcaagactcactgccaggctgagaggggagatcgtttctgccgatggacacagttgtcacccagaaggactttgcagccaaccctggggcagcccaacaacccatgagcaccctggtcacacaccacacacccgagcgtcccaacagctgggacaaaaccccggcaccaagaacatccaaccacagggaaatgcctacgatggggcctgaggtcaaacgcgtctcacggtgtccactgggtgccgcccggggtctaggtaagcatgtgcaagcgcgtgtgcacactaaggagacaggccaggctgaccaggaagccctctctggggaggctcgcgggagattttacttgtgagcttaagctgccctgcgcttcctgctgtccgatgtgagcatctatcactttcctcagaacagaaaaagtgacgtggcagccactggtgggggagagaggatgggagctgtgagctccaggctgtgcccgtatcagagcatgccccgcacgagcccagcgcccacctgcccccgtccaccccgtggtgccaggatcagggtgacgtcgtgcccagccgtgaccactcacctcttgttgacctcgtccaactctgccctcagcttcccaatctctatctgcagccgggcacgctctcgagccgtctcatccaggactctccgggcatcggccagctccgactcgtacagcgccttgatgccactcacctggggagacccaggacagggtgaagcgagagggacccttccccttggactacagcagtcagggggcccggccactggccctgctcagattcccagggactggcacgcagagagagaggatggcagcctggggacactgggacaccctgtgttgcccatctcacagacacagcaaagggagccccctgtcggggagggtccggtaaccaggaggaagccaggcgaccctgggtcccagccatcccaggagcctcctcctctgctgcggccccctctggaatgatcgtctctccacgagctccagctcccagaacagcggcgcccagtgctggagaccaaaggccctgggcctggaccagcacagcagctggatggagcctgtccccttccccggaggaccagccacacctggacatgcagccccttggccgctgtcatagcgacacgatgcctggccattagatgcatttttcacactctcggtttcagaaccagaaaactggtgggatgtttaatcaaggatctctcccgctgggcaccatggacactgggctgatcactctcggacaactggtgatgacagcaacccggggccctcccagaccccactgggcctgagagccccctgcccccaccagcctttgcaacctggagtcccctcccagacccctctgggcccctgagactccccccaggcctctgcaacctggagcccccgctcccccagaccccgctgagcccaagatcccccacttctgccaaccgggggccagcccgtgcccctctgtgcccctacctcacacgcaggcacatggcccaggctcaggctgggctgttccctgggatggagggaggagcatctggccttcccatgctgtgtccccccgacaggccagctgccaatgtggtggctcggaggctccaggacagaagctcccacccctcaatcacagagatctgcagtcagagtccccagctccccaccccaccagcggcccccacctttcacccctcgatcacagggatctgtagtcagagtccccaactccccaccccaccagcggcccccacctttcacccctcgatcacagggatctgcagtcagagtccccagctccctaccccaccagcggcccccacctttcacccctcgatcacagggatctgcagtcagagtccccagctccccaccccaccagcggcccccacgtttcacccctcgatcacagggatctgcagtcagagtccccagctccccaccccaccagcggcccccacctttcacccctcgatcacagcgatctgtagtcagagtccccaactccccaccccaccagccgcccccacctttcacccctcgatcacagggatctgtagtcagtccccagctgccccccccaaccagccgcccccacctttcacccgtcgatcacagggatctgtagtcagagtccccaactccccaccccaccagctgcccccacctttcacccctcaatcacagggatctgtagtcagagtccccaactccccaccccaccagccgcccccacctttcacccctcgatcacagggatctgtagtcagtccccagctgccccccccaccagtcacccccacctttcacccctcgatcacagggatctgtagtcagagtctccagctccccaccccaccagcggcccccacctttcccgacggagacccagcccagccagcaaggacatggggaggggctggagagccaggggtcaccagggcaggcagaagcgactggaacaccctctgggccgcccagctaaagaaagcccctccctaagccccgcgcaaagcccccaaacccgcccctctcgagggcctccaggtgaactcgaggcacatgcggtgccagggaaggcgacctcttcacttcctactaatcctgctgcaaccacagccgccacctgcccggcctctgcacgcgccagctgggggcacagctcaggcttctagtggccttcctgcctcccctcctcccacagggccatgcactcagtgagtttaaaaatatgtggaagcaaaccgcagtgagatgccacttcgcaccagccagggcgtccgtcaagaagacagacagtcgcaggtgcgggcgagtacgcagagaaatcggaacctcacaggcagcggcaggaacctgagctgagacagctctacagaaaacagtccaggggctcccccaagagtcacagagccaccctgtgacccggtaactccactcctgggtgtggacccagaagacatgaaattcacatccatgcatgtttgaaaactacacatggtgccgggcgcagtggctcacacctgtaatcccagcactttgggaagccgaggcgggcggatcacaaggtcaggagatcgagaccatcctggctaacacagtgaaaccccgtctctactaaaaaaacatacaaaaaattagccaggcgtggtggtgggcgcctgtggtcccagctacttgggaggctgaggcaggagaatggcatgaacccgggaggtggaacttgcagtgagccgagatcgcaccactgccctccagcctgggagacagagcgagactcagtttcaaaataaataaataaataaataaaatgaaaaataaaaataaataaaaaaataaaagcaatgcggtccctccaccatccacacacaggaacatgacccagctgtgtaacggagcaaggttctgacaccacagtgtggatgccccttgaggatgtcacactcatgagacgccagacacaaaacgccacacagtgtgtaatcccatttccatgaaatgtccaggtcaggccagtgcacagacacaggcagcgggtgtgtgggcagcggggctggagaaggggacggggagtgaccgctgagggggacaggcttcttttagtggggatgaacgttctaaaattggacacattggtggtggcacagctgtggagatatgaaaacgcgaaacctacgggtgagctgggtgaaccttatgaggcgggaattaactgctccggctctggcgctgaggaaaaggaggaccggaggatggtaggcggaaccaggcccagcaccacccgctagaacgccgtgatgttcccacagccctacagggccaagggtgtctatgcaaggtgggtacagggtcggcctgcatctggagggccacacccccatgttacaggcgaggctcctgtgcagagggctgggggcctgccaggacgcaccccttggcagtgaccgggcctcttctgaggtgggaccctcagcctcaaaccaacgcatgctgggccatctggacaagtcagagtctcaggctgccccagcaccgcagctccaagtcccgtcagcctacagtggggcgggataagggttcccaacctgattttatgtatgggaaaactgaggcacgggtcagtaaaaagccgcctcctgaccaccgctgggtcctagacatatcaggtctgcggggaccaattgtaggacggggacccacagaggcagcagtgcaaagcgagctcctcccgcggcaccccggccacccccaagccctccctcccatgcaggcgatcatctgggccgtgccctccacatctgtgtcctgggaacagacttctagaaaaacccaaatcaggaaaaagcggccagctccacgctgcaaacagctgggcaccaggtgcaggcatggtggtgtctgcctctccctcaaagctcccaaatacccctaacctcaagggaggggctgacgggacaccctcaggatgggggtcacacacgagctctcctgtccccacagagagagagctgactgcggctcacgaggcagaggggccaggatgaacaaaacagcagagtttccaacaaagacaagatcagcgccgggacacacaggagcccgttcaaggtgagaaaaaacagcaactctgcaatggcagccacacgcacagaggcatgctgagcacccccagaccatgtgcacggcggtcctgtaagactctaatgcaaacctggcatgggggctcacccctgtcatcccagcactttgggaggctgaggtgggcggattacgaggttaggagatcaagaccatccttgttaacacggtgaaaccctgtctctactaaaaatacaaaaaaattagccgggcatggtggcgtgcacctgtaataccagctactcaggaggctgaggcaggaaaattgcttgaacccaggaggcaggggttgctgtgagccaagattgggccattgcactccagcctggcgacagccagactccacttcaaaaaataaaaagaaaaagaatctaataccatattcttactgcacctttcttgtgtttatttacttattttgagacagagccacacccagcctggagagcaatgccgcaatcacagctcactgcagcctcaaactctgggctcaagcaatcctcctgtctcagctgccccaatagctgggactataggcacacatactactatgcctgcctaattagtttctaactttttttttaagagatggggtcttgctatgttgcccaggctggtctcaaactcctggactcaagcaatctgcctgccccagcctcccaaagtactgggattataggcgggagccaccgcacccagccctttctcgtgtttaaatgctcacatacttaccattgtgtaaccggtgcccacagcattccacagaggagcgggcggtgtgggtctgtggcctaggaggccacgcccaagcctgggtgtgtggtggcttccaccatccgggagtgtgggagtgcactctaccatgcccacacaaggggcacgtctcctaacgacacgctttccacaaggtatccctgtcactaaacgacacctgacttgaattaatagtttgttcattgtagattttttgaattaattgatttttaaaagataatccattagggcccggtgcgctggtgcatgcctgaaatcccagcactttgggaggctgaggcgggcgaattacttgaggtcagcagttcgagaccagcctggccaacatggtgaaaccctgtctctattaaaacacaaattagctgggtgtggtggtaggcgcctgtaatcccagctactcgggaggctgagacaggagaatcacttgaacccgggaggcagaggttgcagtgagctgagatcacgccactacgctgcagcctgggtggtacagagagaccctgtctcaaaaaaaatatacatatgtctgggcgccgtggctcacgcctgtcatcccagcacttcgggaggccaaggcagttggatcacctgaggtcaggagttcgagaccagcctgaccaacatggagaaaccctgtctctactaaaaatacagaattagccgggcatggtggtgtatgcctgtaatcccagctacccaggaggctgaggcaggagaatcgcttgaaccagggaggcggaggttgtggtgagccaagatcacgccactgcactccagcctgggcaacagagtgaaactccgtctcaaaaaaaagaaaataaaatacatatacatatacatatatatatacacatatatatatatattccattaaaacattactcatcccatcgccccagcgtgacgatgagcaaaacaacacacaaacccccattgaggaacatcctactgcacacctgcccagcccgctcaggaccaaccagaacctctaaccaggaacgtgggggaaactatcagcctggaggagcctgggagacagtgacgtagtcactaaatgtcacgtgagatagtggatggggtcttggggcaggaaaggacatcggggaaactgaggaagtctgaatacatgatggatgttgctgggagcagtggctcacagctgcagtcctacaactttgggaggctgaggcaggaggatcagcctgcctcagccttccaaagtgctgggattacaggcatgagccaccgcacctggcataagatgatgggaggctgaggcgggcagatcacctgaggtcaggaatttaagaccagtctggtcaacatggtgaaaccccatctctactaaaaacacaaaaattgcaccattgcattccagcctgggcgagcacagggcaagactctgttgcccaggctggagtgcagtggcatgatctgagctcacagcaacctctgcttcccgggttcaagcgattctcctgcctcccaagtaactgggactatagccgtgcaccaccacgcccagctaatttttgtatttttagtagagacggggcttcaccatgttggccaggctggtttcaatctcctgacctcgtgatccgcccacctcggcctcccaaagtgctgggattataggtgtgagccactgcgcccagacggtttttacatttttaaatggctaggggtagccaggagaggtggctcatgcctataatcccagcactttgggaggcagaggctggcagatcccctgaggtcaggagttcgagaccagcctgaccagcatggtgaaaccccatctctgctaaaaatacaaaaattagctgggcgtggcagtgcaaacctgtgatcccagctactggggaggctgaggcacaagaatcgcttcatcgcctgaatccgggaggcagaggttgaagtgagcggagattgtgccactgcattccagcctggaaaacgagactgtctcaaaaacaaaaacgataaaggccaggggggaagatgaagagactttgtgacacaggcagattctatgcacttcacagttccatgtgtataaataaagttttattgacacatagcagcacccacttattcacctatgggctaaggcagctttcatcctatggcagagctgagtggttcagatgcagacagtctggccttttttagaaaaagtctgctgaccatgcctggtctgccgtgctgtgatgatgaggaaagttctagaggctggggcacctcacaaagaccctttgagcctgcggaacgggtgtgccggggcaggacggcctccttgtgcttgtgaggcgctgcaaagggctggggacaggctgggccttttctttcatctttcacggcatctagcaagtgctaggcttgagggaagtcaacaagtgtgtccacacatgtgggcctggcagggctcagatagcctgagatggcctttgcctgggacccctcggacacacagagcagcataactcggctggaggaggccacggtgggacaaaatggcccggctaagaactacagccctgtgcagaaaatgcaaacaccggcttggggtcacttccaaagtggactccatcctccacgctcgcctgggccgcctccgagaccccctccagcagccctgagcagccaggggacaccggggcaggggaagacagaagatgccgaagccaggtctcctccctcgggaacgtaaggcctggcagggaagtacctggagtacctgcctctcccgcgcctggacacgggccacagcgcggcctccctgcacctgcccccgcccccagcactcagtgatcctccttcaacaaatacccatctggccagcccccaccccaccctttcccaagccctccaacgatgcttgtatatggcgattcatccacaccgccaaaagacaccccctagtgtcacatgggaatgtggaacccatgcttggcctggttttgtacgagtgtgcaagggtgaactcctgcgggcaggaaagaagtgagcaagttagccgggcatggtggtgggcgcctgtaatcccagctactcagaaggctgaggcacgagaagcccttgaacccaggaggtagaggttgcagtgagccaagatcacgccactgcacaccagcctgggcgacagagagagactctgtctagaaaaaaaaaaaggccaggcatactggctcacacctgcaatcccagcattttggaaagctgaggcgggcagatcacaaggtcaagagatagagaccatcctggccaacatggtgaaatcccatctctactaaaaatacaaaaattagccgggtgtggtggtacacgcctgtaatcccagctacttaggagggtgaggcaggagaattgcttgaacctgggaggcagaggttgcagtcagccgagatcacaccactgcactccagcctgggcgacagagtgagactctatctcaaaaaagaagtgagaaaggcgtgtgtgaggacctcgggggccgccacacaccaggatgctgtgagtcgtgttatgagcctgaaaaaatctgaactgagtccctcacgcctcccagcaggctcctcggcctggccattctcatgggggccgtgttaccctcatggaggctgcgtcatcctcgtgggggatgggtcatcctcatgggggctgcgtcatcctcatgggggctgggtcatcctaatgggggatgggtcatcctaatgggggctgggtcatcctaatgggggctgggtcatcctcgtgggggctgggtcatcctcgtgggggctgggtcatcctcatggggctgggtcatcctcgtgagggctgcgtcatcctcgtgggggccaggtgattctcttctcggggcgctgagcagtacccagcctccacccacgctgtgccgatgccgtctccctcccaatgtgacaaccaagggcatgcccagccttggccaagagtcccctgggggcagaagctggccaggtgagagaggccctgctgtccaggtgacctgcatgctcttaggcctgacaccccaggtccctcctcgttcagagctccctcccctgcccccatcctgccagcctgagcctgaggctgctctctgaaccccacgtggcccacctgtgtctagaaggcccccagctattccaggtcactccctccatgtgggcccacatgacgtccccccaccagcggcccccaccccagcaggcttccaactctgctccccactagccgggttcctggcccactagtcgcaggcggaactcccagctgtcccctgccacatgccctgcagacacggctgggtgacagggctcacggaggggccagtgtgtcacctgctaaatggctgccttcactggagtcagacccgcatttcacccagcctgagtgaactgagttgtaaaggatgctgctgcggccccgagaggtggctgggccaggctccctctagggcacagggccggtccaatggggcgtccagtggggctggggctggtacctccccagcactcaccaggccctgcaccctcaaagctccctgcagctgttcgtcccattggcaggtgggataacagaggcccaaagacaagaaaccagctctaaccctgcacgccacgggtccagcaggcggcctctaagttgggacaactccgcactggacagatggcaagatggaggctccaagagacacaggggcctgcccaaagccacactaattgaaaagcaggggactggccaggcacggcggctcacacctgtaatcccagtactttgggaggccgaggcaggcagatcacctgaggccaggagtttgagaccagcctgaccaacaaggccaaactctgtctctactaaaaatacaaaaatgagccgggcatggtggtgaacacctgtaatcccagctactcgggagacgggggcaggagaatcacttgaacccgggaggcagagggtgcggggagctaagatcgcgccactgcactccagcctggacgacggagcgagactctatctcaaaaaaaaaaaaaaaaaaaaagaaagaaaagcaggggatcccaccaagcactgatcttccttctacctccctgaaggcaccagctacattctttcaggttccctgtccccagggcactgtgaaaacaacccacagggagctactgaacaaaagttaacctgctgtggccccacacacaagtaagaggtgggtattataattacacccattccaaaggcgagggcactgagacccagagagggtaagcgactagcccaaggtcacacagagggtaagtggctcccagaaatgacccgaccccctcaacaagcagctcttctcccagaagcccaccacgtcctctgatctccagatgggcgagtggggactgggcgctgcaaatcccgacttcggcacccagctctcccaacaggacactggggcctagggaccccaggaccccaacccatggcaggaatcaagtgggtgctcctgcctgccccccgttctggagtcctgtccttggattgggcatggccagtgggagggacaaagagcctccccagggttaggttggggggcaggacagattgcacccagaccccaagacaccccgacctcatgtccccttggtgggcagactttcccgcctcttctccttcagtctgcactgaagcctcggggcccattcagaacctcaacactttccaccggacccaagatcccaactctcacccttccttcatattctcttgggggcagaacctgccagaccaccgctgacaccagggcacaaataagggactcccaaatttcccgtgggaccccaaggtatcagaacctctccctcggccccctacccaccctgggcctggtgagagatgaggggcctaattcccaccccagtcaccaatctcttctggattcatcagggaactcgctaaagctccagggagaactgagaccacgtgactcaccccagagactccagggagaccccccacacaccccatcttgggcctcctcagagggcctgggccccccagtctccttggagcccagagaccacccccattccaccccagataccccaatacccagcttcatccccagagactcccactcacaccccctcagttggggggggtccgccaagtctccttggaatcctctgagggacgaggcatatggggggctgcagcccaatactcagggagcccccaaatccccaggacctctctttggtggggagccctagtctgtaacccccatggccccaaaatgcacctctcacggaagggtccccagagctagctggaggcccctctgcagccctcactcaggacacggaagatctcctgggaccccctccataggtggggcattcctggtctgcacttttcactcagtgccctagaaaccccctggaggtccccaagagaatgggccactccggtctgcacccctcccaaggggtcccccaagatctcggaaactgcggtgggcagggcctgcccaggtggcacccctcactcagggtctccccctggagatccccgaggccaggctgaccccacccctgctcagggtcccccgtgatcgcgtactccgcggtgggctgggcctggccgagctgcacccctcactcagggaccccttgaaaccccctggagacccccaagccgggacccttcccggtctgcacccctgcccagggtccccgcgatcgcgcaccccgcggtggccaggacctgcacccttcatccaggagccccccgcaaaccccctggagaccccaagccgggagtcgttcagagtcccccgcgatcgcgcgccccgtggtgggcggggcctggccgagtagcacctttcactcagggactctccgaaacgcggcggagatccccgaggccggactgtccccgtctgcatcccagctcagggttccccgcgactgggagccccgcagtgggctgggcctagccgagcagcacccctcactcagaagcccccaaacctcctggagacccccgagccggagcctgtccccgtctgcacccccgcccagggtccccgcgatcacgcaccccgcggtgggcggggcctggccgaactgcaccgctcactcaggggcccctcgaaaccccctggagaccctcgagacccgggcccgtccctgtctgcacccagggtcccagcgattgcccaccccgcggtgggagggacctggccgagctgcacccctcactcaggggccccccgaaaccccgcggaaacccccgaagccggggcccgtccccgtctgcacccccgcccagggtccccgcgatcgcgcgccccgcggtgggcggggcctgccggctgcacccccgcccggcccctaagccccggcgcccacctcgcgcgtggtcacctcctccttctctgagatcttgagcaggagccggtcgttctccagctccagcgcgcggacgcggtcgatgtagtgcgccaggcggtcgttgagctcgcgcagctcctccttctcctgcagccgcgacaggcgcgtgggcgacagcggcgtggcgggcccgcccgcgcggccgggcagcggcgtggccatggtggcggcggctcgcggcctgcgctgctcccgacggcggcccgggctcggcgggctcattcaatccgcgccgccggctgcaagatggcgccgcgccgcgccgcgcccgccgcccgccgcggcggggcagcctgggactggtagtccgaccgccgggcgcgcgcggggcacgccggaagttgaagtctccgtccagctctcgcttcgcagaggcgctgactccagagacagacttcctggctgcaaactcccagctccgccacgaggaaacagcgttgggttgctttctagtacctgtttccccacttagagaacctcaaaacgtgttcaaagaaccagacacaaaaggccatatagggccgggcgtggtggctcacgcctgtaatcccagcactttgggaggccaaggccggtggatcacttgagaaaagaatttcgagatcagcctggaccacatagggagacccccccacaccatctctactacggaggcgcgcgccggtaatcccagctacttgggaggctgaggcaggagaatctcttgaacttgggacgtggaggttgcagtaagccaagatcgcggcactgcactccagcctgggcaacaatgagaaactttgtctcaaaaaaaaaaaaaaaaaaaaaaaaaagccatatagtgtacaatgccactgatataaaatgtccagaagaggctgtcaaggagtatgaatttcaacaaattgagtttaatgatctcattggctcttattagcaattcatgaattggatagcattcaatctattaaataggcactccaatgagctgagcagagaggatgggcattctgcattacaggcagaaaaggctgaagaaaggagaaataagaattaaaataaaagccaggccaggtacagtggtttgctcacgcctgtaatgccagcactttgggaggcggaggtgggaggatagcctgagcccaggagtttgagactggcctgggcaacatagcaagaccccatttctaaaaataaaaataaaaaaattagccaggtgcagtggctcacacctgtattcccagcactttaggaggccaagccgggcagatcatgaggtcaggagttcgagaccagcctgaccaatatggtgaaatcccgtctctactaaaaatacaaaaattagccaggcatggtggcacatgcctgtagtctcagctactcgggaagctgaggcaggagaattgctttaacccgggaggcggaggttgcagggagccaagattgaaccactgcactccagcctaggcaacagagtaagactccacctcaaaaaaaaaaaaaaaaaaaaattagctgggcgcctatagtcctaggtatttgggaggctaaggtggcaggattgtttgagcaagagaggtcaaggttgcagtgagccctgatcacatcactgcattccagcctgggtgacagagtgagagtttgtctcaaaaaaagtaaaaataaaaatacgaaataaaaaccaattggttgtttcaaagttacttttttcatagggtctgttttaaccccctctattttgagggtacttccctatcaggttaaccggtcccctttggcttggtggctgtgaatgtttttttttgaaaacctgcaccctttaaagttcagtttgaggccaggtacgggtggctctcacctgtaatctcagcactttgggaggctgagatggggagatcgcttaagcctaggagtttgagaacatcctgggcaacatagtgagactctgtctccaaaaaaaaaaattttttttttttggagacagagtcttgctcttgtcacccaggctggagtgcaatggcatgatctcggctcactgcaacctccacctcctgggttcaagcaattctctgcctcccgagtagctgggattacaggcacccgccaccatgcccagctaatgtttgtatttttagtagagacctggtttcaccatcttggccaggctggtcctgaactcctgacctcgtgatccacccacctcgacctcccaaagtgctgcagttacaggcgtgagccacggcacccagccaaaaaaatttttaataattagccacatgtgctggcacacacctgtagtcccagctcctcgggaggctgaggcaggagaatggcttgcatccaggagttcaagtctgcagtcagccatgattgcgccactgcactccagtgtgggcaacggagcgagaccctatttcaaaaaataaaaaaaataaaagatcagtttgactacgtggtacctggcactagtgactccattccaattttatctggtctgctggggactagagaccccattgtctaaaacaatggcctgccatacattttatttaacaaggccaggcgcggtggctcatgcctgtaatctcagcactttgggaggccgaggcgggcagaccacctgaggccaggagttcgagaccagcctggccaaaatggcaaaaacctgtctctccaaaaagtacaaaaattagccaggcgtggtggtgtacgcctgtaatcccagctacttgggaggctgaggcacgagaatcgcttgaacccaggaggcaaaggttgcagtgagctgagatcacaccactgcactccagcctgggcgacagagcaagactccgtctccaaaaaaaaccccccaaaattgtaatttaacaagacaacctatacagcagtgtttctccaactctgcactagatatttggggccagatcactctctgttgcagggggttggagtcaggaggtgctgtccattacagggtattgagcagcatcctcggtctccacccactccatgccacgagcatcccagcctcatacttattttttattttatttttatttttagttgaggcgggtctcgctctgtggcccaggctgcagtgcagtggcgtgatctcggctcattgcaacctccgcctcccgggttccagcgattctcctgcctcactctcccgagtagctgggattacaggcacttgccaccatgcccggctaagtttctgtatttttagtagagacagggttttgccatgttggccaggctggtcttgaactcctgacctcaaatgatctgcccgccttggcctcccacgttgctgggattacaggcgtcagccaccgcgtccgaccccggccccctagttatgaaaaccaagtatgtctccagagattgccacatgtcaccagaggggcaaaattgccccaattggagaataacttcctcctgacctagaactggcccggtcttccttctgcctggggaactcctcctttttacacatctcaccttgggggtttggctcagcctctgccagagaccccagtaaatcacacactgagaatctaatgccctttccagcctactgaggacaccaggggaaagagcccacctgcctccaacagccaacattcactcgctattattcccctcttaccagatagacccccagccttagaacccaggcaggaagcctggcatggtggctcacacctgcaatcccagccactctgggaggctgagacaagaaaatggcttgagcccaggagtttgagaccagcctgggcaacatagcaagacccaactctacaatactctacagttttttttttttttttttttttggagacagagtctttctgtcccccaggctggagtgcagtggcccaatcttggctcactgcaacctcctcctcctgggttcaagagattctcctgcctcagcctcctgagtagctgggatgacaggcatgcgccaccatgcctggctaatttttgtatttttgtagagtttcctcatgttggccaggctggtcttgaactctggacctcaagtgatctgctcacctcggtttcgcaaagtgctgggattacaggtgtgagccactgcacccggcccctacaaaaaaatttttttaattagttggtcgtggtggcgtgcatctgtatccccagctacttgggaggccgagtcaaggagatggcttaagcccaggaggtggaggctgcagtgagctatgattgcaccatttcactccagcctggatgacagcgcaagactctctctctctttttttttttttttggcaggggggacagggtctcaccctgtcacccagattgcagtgcagtggcttgatctcggcttactacaacctccacctcccagggtcaagtgattctcctgcctcagcctcccgagtagctgggattacaggcgtgcgccactacggcccagctaatttttgctagagacggggtttcaccatgttggccaggctggtcttgaactcctgacctcaaatgatccgcccacctcggccctgcaaagtgctgggattacaggcgtgagacaccgtgcccagctgcaagactctttctcaaaacaaacaacaaataaaccagccaggcaagagggagctaagcagtgactgcgtatttagaggactgatactgttttccttcctcataaagggaggaatataaaatataaagacagatggtaaagcacaatgggaaataaataatactacaggaggcggggccagaggggagaaggatgattgaggtttgggtgggaaatggggtcacttttttttttttttgagacagagtcttgctctgtagcccaggctgaagtgcacgatctcagctctctgcaacctccgcctcctgggttcttgtgattctcctgcctgagcctcctgagtagctgggactacaggcatgtgccacaacgcccggctaatttttgtgtttttagtagagacggggtttcaccatgttggaccaggctggtctcgaactcctgatctcaggtgatctgccagcctcggcctcccaaagtgctgggattactggtatgagccaccacgcccggccgggtcacttttcctattctccaccctcagactgatctgaaaccgcccccccgctccgcatcaacttctcactgaccaccggccttggccactggctgaccagatcccccaactagccccttactggaggccctgcggggtcccgcccccaaccccatcgcgctgcccctctgggcacttccatccccacatacccccatacccagcctttgcccgtgctgttccatccgccaggagcgccgtttcctgcctgactgcgcggccctgggcctcagtcttgcgctctgcaaaccggggtctcgaatctaccccagccctcctgtctcggcgctggggaggggcttcgggtgcccagagccatccccgcgggacccccagggactggactccaagtcccagaaagccccgcgcttcccgtgggtggggcccggggctttccccctcccagcgcgcagtttgggaggcgctgggcaattttcaaattttggcgccgaacgggaggggcggtgacagctgagaccgtggtccccccgggggcacccacgcccaggctgctgctggcagctgcgcccagagcccgaggtctggggcatcccgcaaagctgccccgtccattccgaggggcctcccaaggcaccacacgcgccagggggctccgggcccatttccattatggaaaactgaggcacaggaaggttagggaccggtcggggaatccgcaccaggggcgtagcggaggcgggattcgaacgcgggaccctctttcccccgggagctagaaattagtgaccaattggctgggcgcggtggctcacgcctgtaatcccaactttgggagtccgaggcgggcggatcacctgaggtcaggagtgcgagaccagaatgaccaccatggcgaaaccccgtctccacttaaaaaaaaaaaaaaaaaaattagccgggcgtggtggcaggcgcctgtgaccccagctactcggaaggctgaggcaggagaatcgcttgaacccaggaggcggaggttgcagtgagccaagatcgcgccattgcactccagcccgggctacaaaagcgaaccttcgtctgaaaaaaaaaaaaagaaaagaaaagaaaagaaagttagtgaccaactgctgtctgcttttggggagagggtacggggccgcgggagagaaatcccggaccctgggactatgcagcccgtgagggccccagtcccgacccgtccattccactgacctccacccggcaccgccactcccacccggggagtggattttggcgccagattttaaaaatctcagcctaacggctgtggctggctcccagcccggaatgcgagcctggagcccggattccggaacctggatctggaggagcccggattccagagcctggttctgagggagctcggattccggagcctggatctcggggagcccggattccggaacctggatctgagggagctcggattccggagcctggatctccaggagcccggattccggaacctggatctcagggagcccggattcggagcttgggtctgagggagctcggattctgaagcctggatctcggggagcctgaattctggagcctggattctgggctgtgggtcttgggaagccgaattctggaacatagattccagaacttgaaggccaaacctggtatctaagatcagaattcaggaccctggagttggaaccttgtgaccccaacagaaatccgggaggcaagcagagctctggggccgtggctggcagctgcctgttaaatgagtgaatggaacagtgaaatcaacacatatttgcgtggcttctactttgtggcaggcactggggggacagaggggaagcgagtacacattataaataagtgaattaggtagggcgcagtggttcacacctgctatcccagcatttagagaggccgaggcagaaggattgcttgaggccaggagttcgagaccagcctggacaacatagtgaaagcccatctctacaaaatatacaaaaattagctaggcgtggtgactcatgcctgcagtcccagctacttgggaggctcaggtgggaggatcacttgagcccagaaggtagaggctgcagtgagcagagattgagtcactgccctccagcctgggtgacaagagtaagaccctgtctcaaaaataaataaatagggctgggcttggtggctcacacctgtaatcccaacactttgggaggccgaggcgggcagatcacctgaagccaagagtttgagaccagcccagccaacacagtgaaaccctatctctattaaaaatacaaaaattagccgggcatgagggagcacgcttgtaatttcagctacttaggaggctgaggcacgagaattgcttgaactcgggaggcggaggttgcagtgagccgagattatgccactgcactccagcctgggtgatggagtgagactctgtctcaaaaataaataaataaataaataaataagtgaattgtatggcatgctagaggatggtgagcatgaggaagaaagaaagtggggtaaatgctggggcatgtgtggagtaggggtagaggtgggcctcttagaaaagggcaagacagggtctcgctatgttgcccaggctggtctcaaactccttggctcaagtcatctgcctgccttggcctcccagagtgctggaattaccggcatgagccaccgtgcccagcttatattcacttttcttatctcacagtttctgtgggtcaggaatccagatgtggcttaactttggcatcctctgtctcagggctctgaaaggtggcaaccaaggtgtctctggggcagagtccacttctagactcactcacacgtggtcagaaggattctgttccttgcagactgttagaccaagagcctcaaatcctggcccactgctgtccagggcctgcctccgttcatcaggaggagctgggggtgaattagtcagggttctccagagaaacagaaccagcaggaggggagagagaataagagattttttttttttttttgagacagagttttgctcttgttgcccaggctggagtgcaatgatgcaatctcggctcaccacaatctctgcttcccgggttcaagcgattctcctgcctcagcctccccagtagctgggattacaggcatgcgccaccacacctggctaattttgtatttctagtagagatggggtttctccatgttgattaggctggtcttgaacttccgacttcaggtgatccgcctgccttggcctcccaaagtgctgggattacaggcgtgagccaccacactcggccaagagatttattataaggtattgatgcacgggggctgacaagtcacaacatctgaagtctgcaagctggagacccaagagagccgatgttcctttttatttttattttttttgagatggagcttcgctctgttgccccagctggagagcagtggcatgatctcggctcactgcaacctctgcctcctgggctcaaatgatcctccccccttagcctcccgagtagctgggattacaggcatgcgccatcacgcccggctaatttttgtatttttagtagagacagggtttcaccatgttggaaaggctggtctcaaactcctgacctcaagtctcctgcctcccaaaatgctgggattacaggcgtgagccaccatgcccggctgagagctgatctttctgtttgagtctgaagacaggaaaaagctgatgttccagtctgaaggccttcaggtgggaggaattctctgctccccaggggagtggcagcctctgtattccatccgggccttcagtgaattccgcaaggcccacccgtgctagggagggtagtgggtttgagtgactcagtgagtctactgatgcaaagggtcaaaggctcatctcatctaataaccccctcaccggcatgcacagagtaatgtttgaccaaatatgcaggcacccacagcccagccatgatggcatataaaattaaccaccgggcggggcgcggtggctcacgcctgtaatcccagcactttgggaggctgaggctggtggatcacttgaggtcaggagttcaagaccagcctggccaacatggcaaaaccccgtctctactaaaaaatacataaattagccaggcgtggtggtaggtgcctgtagtcccagctactggggaggttgaggcataagaatcacttgaacccatgaggtggaggttgcagtgagccaagattgcaccactgcactccatcccgggtgacagactgagactgagattctgtcaccaaaaaaaaaaaaaaaaaaaaaaaaattaagcatcatacagccgggtgcagtagctgctcatcctgtgatcccagccctttgggaggccaaggaggaaggatcgcttgaggccaggagttcaagaccagcctgggtaacagagcagggccccatatctacaaaaaataaaattagctgaaagcgcctttgcaaaagttctatcagtgagaaaaaaaaattttttttttttgagacggagtctcgctctgtcgcccaggctggagtgcagtggcacaatctcggctcactgcaacctccgcctcccgggttcaagcgattctgctgcctcagcctcccaaatagctgggactacaggcacgcgccaccatgcccagctaagttttgtatttttagtagagatggggtttcaccatgttggccaggatggtctcgatctcatgacctcgtgatccgcccgccttggcctcccaaagtgctggaattacaggcgtgagccaccacgtccagccgagaaaattataacagtaggctaaactaactaacccccatcttgccttaattattcctgggctattgggcccagctaacttgggaagacatttaggctacagtttaagtgatagtagaccttgcacaaaacccaacagcttttgtcaagctaacctgaggccttcaggttgagggaggaggggagcctgacatctgttaaggtgcaaacgttattctggaggttataagatatgcagcttccaggccaggtgcggcggctcacgcctgtaatcccagcactttgggaggccaaggcgggtggatcacttgaggccaggagttcaagaccagcctggccaacatggtgcaaccccatctgtactaaaaatacaaaaattaaccaggcttggtagcccatgcctgtagtcccaaatacttgggaggctgaggcaggagaatcgcttgaacctgggaggcagaggttgcagtgagccgagatctcaccactgcactccagcctgggcgacaaagcgaaactcagcatgcaaaaaaacaaaaaaaaaacaaaaaaaaaacaaaaaaaaagagatgtggttcccccaattactcctgcaaataacaccattattgtagtttggccttttgagatgtctttccacgtgttttgcatgtctgacacccgtggctccacctggactgacaaccctgctcctgaggttccacacagaagcgatctggccggcaggaggacccctgcaacctgctgtgagtccatctctgcccccaaccaaccagcagcaagcacctgtttacctggcccactcccactccttcccacaaaactgcccttgaaaaacccctaacctaggctgggcgtggaggctcacgcctggaatctcagcactttgggaggctgaggtgaacggatcacctgaggttaggagttcgagaccagcttggccaacatggtgaaactccatctccaccaaaaaaaaaaaaaaaaaaattagctggatgtggtggcgtgcacctgtaatcccagctattcagaaggctgaggcgggagaacctcctgaacccaggaggcagaggttgcgaattgcttgaacccaggaggcagaggttgcagtgagctgaggtggcgccactgcaccccagccttggtgacagagcgagactcgtcgcaataaagaaaaacctctaacctatgaggtttgaacaagttgatttatgaattccatctcccacgtggcgtggccagcctcatgtctattaaactctttctctactacaatgctgtggtctctttctctttcgttgtttcctttcttttcttttttttttttttgagacagtctcaccctgttgcccaggctggagtgcagtggctcaatctcagctcactgcaatctccgcctcccgggttcaagcgattctcctgcctcagcctcccgaatagctgggattacaggcgcccgccaccactatgctcggctaattttgtatttttagtagagacggggtttctccatgttggccaggctggtctcgaactcccgacctcaggtgatctgcccacctcggcctcccaaagtgctgggattacaggtgtgaaccaccgcgcccagcctctattttttttttttttttaagtaaaatactttgttagactgggggtctccctatgttgcccaggctggtctcaaactcctggactcaaggaatcctcccactttggcctcccaaagtgctgggattacaggcgtgagcccctgcacccagtcacgtggtctttctttatgcagtgggcaggaagaacccctgcatagcggggtgtggtggcccatgcctgcaatcccagctatttgggaggctgagatgggaagattccttaagtcaggagttcaaggctgcagtgagctgcgatgtcactgcattcaagcctgggcaatagagcgaagcccatctctaagaaaaaaaaaaaaaaaaaaattaaccaccctgggggatcactggagccaggcccgaagctgcccaccatgctagcattgtctgcaatgcctgctgccgggggttccagctgttccgatgtctgtgagcaagtgtgtaagttgtaaaatactcagtgcaaggcgaatgattcctgtccattgtgtagcaagaaattttgcctcgaccagagagagatctggcttttgtttcagccactgggaggtgactcttaggccccaggaatgtcctgcctgatggatataccgttctgttttttttttttttttgagacagagtcagagtctcactctgtctcccaggctggagtgcagtggtgcgatctcagctcactgcaagctccgtctcccgggttcaagcgattctcgtgcctcagcctctcggagtagctgggattacaggcgccttccgccacacccagctaatttttgcatttttaggagagagggggtttcaccatgtgggccaggctggtctcgaactcctgacctcaagtgatccattcgccttggcctcccaaagtgttgggattacaggtgtgagtcaccgcgtccggcattcgagtggctttcgaggtcactacagtaggggaggtgtacggagcactttctatgccaagcccattctaggtccttgttttgggtaaacatttccacaacctgacttttcccatgaaaagagggagtttcagggaggctaagccaccaacccaaggacacacagctgatgacggctgcaggtgggatttgaaccaggcaaacgtgacctcagacagagcctctccttctccctctctctgcgaggcatagtcccagacctgccagcctcttgctgtgcacagtttccctgcccctcccctgccactgtcctcagaatttcccaaatgtgcctcagccttcgccgtagcctccgctgccacctggcgtggtgatcccacctcctcccaccccaggcctgtcttacaaatgtctgcaagttcaaatgatgactcagctccatcccgaaacctctccttggggacaggagtcatgtcttgctcgttttgttcatctttgcagaaaaacatgatgtcagagcccagccgctgccaatcacttcctggctacatccggagtgacacgcagacccctccccgcagcccccaaagcccgtctctgtgagctcatcttcccggctctccctcttgcttactctgttccacccccagggcctccttgggattcctcaaatgcaacaggtgaggtcctgcgtcagggccttttcaaacactgtgcctgctgcctgggacctctgcccccagagccccttgaacctgactttttaccgttttttttttttgagacagagtcctgctctgttgtccaggtggggtgcagtggcatgatctcggctcactgcaatgtctacctcccaggctcaagtgagtctcctgactcggcctcctgagtagctgggattacaggcatctgccaccacgcctggccaactttttgtatttttagtagagacggggtttcgccatgttgtccgggctagtctcgaactcctgacctcaagtgatctgccctccttggccttccaaagtgctgggatcacaggcatgagccactgcacccagcccgcccccacttttttttttctttttgaggcagggccttgttttgtcgcccaggctggagtgcagtggtgcgatcatagctcactgcagcctcaaactcctgggctcaagtgatcctcctgctttagcctcccgagtagttgggactacaggtgtgcccatcagacctggctaatttttaaaaaattatttgtggctgcgtgcggtagctcacacctgtaatcccagcactttgggaactcgaggcgggtggatcatgaggtcaggagtacgaaaccaacctggccaagatgtgaaaccccatctctactaaaaattagccgggcgcagtgtaatcccagctacttgggaggctgaggcagaagaatcacttgaactcgggaggcagaggttgcagtgagctgagattgtgccactgcactccagcctgggagacagagagagacttcgtctcaaaaaaaaaaaaaaaaaaaaaggccaggcgtggtgggtaacacctgtaatcccagcattttgggaggccgaggtgggcggatcacgaggtcaggagatcgagaccatcctggctaacacggtgaaaccccatctctactaaaaatacaaacaattagccgggcgaggtggcgggcgcctgtagtcccagctactctggaggctgaggcaggagaatggcgtgaacctgggaggcggagcttgcagtagccgagatcacaccactgcactcctgggtgacagagcctgggtgacagagcgagactccgtctcaaaaaaaaaattatttgtagagatgggagtcttgccaggttgcccaggctggtctcgaactcctgagctcaagcgatcctccccacttggcccccaaggggctgagattacaggcatgagtctacccttagagacagaggctgcacgaagtcatgatcacaccactgcactccagcctgggcaatacagggagaccttgtctcaaaaaagaaaaagagaaaggaactaatctcattagaagactccactctcatgagctcatctgaccctaatcacttcaaagcccccccgcaacaccgtgcccagcctgcagtacgtttttttattttttatttttatttacttatttttttgagatggagtcttgctctgtcacccaggctggagtgcagtagcgcgatctcggttcactgcaagctccacctcctgggttcacaccattctcctgcctcagcctcctgagtagctggcactacaggcgcccgccaccacgcccggctaattttttgtatttttagtagagacagggtttcactgtgttagctgggatggtctcgatctcctgacctcgtgatctgcccacctcagcctcccaaagtgctgggattacaggcgtgagccaccacacccggccacattttttttttaactctgaatgaatgcaaaaacctctatgctggataaaattttaaaaatttattttgtttaaagccaaatacggtgactcacgcctgtaattccaacactttgggaggccgaggcaggcagatcatttgaggtcaggagttcgagatcagcctggccaacatggcaaaaccctgtctctactaaaaatacaaaaaattagctaggtgtggtggagggcgcctgtagtcctagctacttgagaagctgaggcaggagagtcacttgaacccaggaggtggaggttgcagtgagctgagattgcgccactgcactccagtctgggtgacagagcgagattctgtctaaaaaaaaaaaaaaaaaaaaagattatgacaggattactcatactgattattcctctcacctcaggctccaagatggcctcggcgacactgttattgatctcattttttattttattttatttttagacacagggtctccctctgttgcccaggctggagtgcagcgacacaatcatagctcactgcagcctcaaactcccaggctcaagtgatcctcccacctcagcctctcacgtagctgggactacaggtgcgcaccaccacggtcggctaatttttaaaatttttgtagagatggggtctccctatgttgcccaggctggtctcaaactcctgggctcaagcaatcctcctgcctcggcctccaaaagtgctgggattacagaggtgagttctggcgcccagcccaaagataatagcacacatttcctgagtgcttacctgattctgggaatttcctccttcaatgcctgtgatgaagcctttgtgtgactgttcccatcttacagagaaagaaactgaggctggagctcattttctttttttttttttttttgagaaagagtctcactcttgttgtccaggctggagtgcagtggcacgatctcggctcattgcaacctccacctcccgagttcaagcgattctcctgcctcagcctcctgagtagctgggactacaggcatgcgccaccatgcctggctaatttttatatttttagtagagatggagtttcaccatgctggccaggctggtcttgaactcctgacctcgggtgatccacccgcctcggcctcccaacatgctgggattacaggcatgagccaccacgcctggcccggctggagctcattttctgagctcaaaggcacagagctcagagtctcttgaagatattccaagatactccagatattctaagatgcctggagccagggctggaaaaaggaggcacaggtgggcttggggtctagaaagagaagcctggagggtggaggaccatgggggtccaggcagtcagtctgggagaaaacaaggccaagtcagtgttgacagaggagtagggttttcctgctgaagaccagaggaagacagcatcccaggcggaggaaacagctgacaaaggctgggcctctcgcagaggaggttgttatggctggcacgggggacacacggaagaaggacttggacacatattctctgaggccctgctttgctcgccttattttatttattttatttgctttatttttgacacagtgtctcgctctgtctcccaggctggaatgcagtggtgcaatctcggctcactgcaacctccacctcccgggttcaagcgattctcctgcctcagcctcccgagtagctgggattataggcatgtgccaccatgcccaggtaatttttgtattttttgtagagacggggtttcaccatgttggccaggttggttttgaactcctgaccccagatgatccacctgcctcagcctcccaaagtgctgggattacaggcatgagccaccgtgcccagcccttattttatttatttatttgagacggggtctcactctgttgcccaggctggaatgcaactgtgcaatcccggctcactgcagccaggaacccctgggctcaagtgatcctcctgtctcagcctccggagtagctgggtgcacacaacacaccccattctttctttcttttttttttttttaaagactgagtctcactctgtcactcaggctggagtgcagtggcacgatctcggctcactgcaatctcggcttactgcaacctctgcctcccaagttcaagcaattctcctgcctcagcccccagagtagctgggattacaggcatgtgccaccacgcccgactgattttgtatttttagtagagatggggtttctccaggttggtcaggctggtcttgaattcccagcctcaggtgatcctcctgcctcagactccccaagtgctgggattacaggagtgagctaccgtgcccggcctttttgtttgtttgtttgtttgtttgtttgttttggggaggatggagtctctctctgtcaccatgccatgtgcagtggcatgatctcggctcactgcaacctccacctcctgggttcaagtgatactcctgcctcagcctcctgagtaagctgggattacaggcgcgtgccaccacgcccagctaatttttgtgtttttagtagagacagggtttcaccatgttggtcaggctggtctcgaactgacctcacgatctgcccgcctcagcctcctaatgtgctgggattacccagcctgcaatactttttaaaaatcaaaatcaatgcccaagtatccatgaggaacaaaatatcaaaattgtaaataaagacagaatctgactttgcacttatcccacccacctccctgatcttccttatcttcagctcatgttggccatgttggtcaggttggtctcgaactcctgacctcagttgatccgcccgcctcggactcccaaagtgctgggattacaggcgtaagccaccgcgcccggccgatttaacttttaaattgaaattataaaatataaatatgtatgttgcatgcgtaaaacattgcataaagttacataaaacgttgcaaccgccacggtccccttatcccccgcctccagcccagtgccccgcccgtccgtccctctcttccggcgctgagggcgcagaaactcggcgcggccaccagatggcgccaccgcgcctcgcagccccgggacatttcgtgccccagcggtgggcggcgcggaggaggtgggatgcgtcagccggacccgcgggccggggagccgggcaactggggaaagtgagccgccgggcggaggccagaccccaggctggcgggggaggggactcagatgtgagtcacccgggagcccccagtcgaccgtgggagacgttgtcatgcggggcctgccagcctcgctcctgaacagccttcccggggcggcggagtcctgcaggcggccgtgcctggcgcacacgcgtggctccaacacgaactagcctatggcctcaccaagcctcagtttccccttttgcataatgcacataagcatcccccctgcttcccaggtcttggattaaatcatccatgaatccggaggggtggggggtaccaggtccgcaccacgcactcaatgcaggtcagcgcccaccccggagtgagaaataaaagtagccgtcatccttgcacgtgggccctgggtggcggcgtgcagccggagcctgcaccattcccctcaacaatggctttctccagggcctggaggcctccgcacgggcaaaggctggaacgccaggcagccggcgggggcggggccgcgccacctgcacctcccacgcgcaccccaccctgatactcgcggggtcggcgaggaggcgcccactttcttctccagagcgccccgggctttgcaacctcccactttcggggccctcgaggaggcctcccgcgaccaccaggtgacagctgatgtgtattgggctcttactgtcagccgtattttatgccatgctctgcaaaccagcgaggccggcgctgcagacccattactcagacgggaacagagaggccgggagaagcgaaatcacccaggggctggggtcgtcgcagccaggagagactccggccctcaccaccacctgggcgagatcacgctgcaaacggggccccttcccggtgcagcccctccacccccagcagaacttgggaaaggcgcggtccgggactctccgcggatcgggaggggattccaggcccccccgaaagtccgggccgcctcgcgcgctggaaatcccgcgcgcgccccgaaccgcggctcggctgccgggaaatcaggagaaaaaaacttctgcttttttttcttttctggcattcgcggtcacctacccggcccccgcgcgccctcctcccggttctcgcccccacgtggggcgcccccgcacgccgctcctccccctcccctccgtcggccaaccgcagagctagctgcactcgcccttgtctttccaccaataggaggggcgaatgactccactgaggccacgcccaatgttcaagtctataaaagtcggtgccggaggctcccagctcagatcgccgaagcgtcggactaccgttggtttccgcaacttcctggattatcctcgccaaggactttgcaatatatttttccgccttttctggaaggatttcgctgcttcccgaaggtcttggacgagcgctctagctctgtgggaaggttttgggctctctggctcggattttgcaatttctccctggggactgccgtggagccgcatccactgtggattataattgcaacatgacgctggaagagctcgtggcgtgcgacaacgcggcgcagaagtaagtagccggggctgccgccgcctgaggtcagccgggacgggatgggtcgggttgggccgggccgggagcggaacgtagcacccggtggtccgcccgtcactgatccctctttcctggtctcaggatgcagacggtgaccgccgcggtggaggagcttttggtggccgctcagcgccaggatcgcctcacagtgggggtgtacgagtcggccaagttgatgaatgtgtgagtcagacccccttcccgggctgggcgcgggtgggacgggacctcccctccgctctggacgctttccgcacgcttgtcttgcatggagctgggacttccccaagtgccccccgctgtggatgcagagcttctctgccgttttgtggatcgggggctgccgtatcctgatgtatcgtctgcaaacacccctcccgccgtgggcctgtctccccctaccccatactttgaaccgtgtgccctcccctccccccaccgtcaccagcttgcagaggcaatcccctgcacccttgcagtttctcttttgctcttgcacgctccttttttgcaaactccccctgcacggtggcccctcccctgtccccggctgacccatccctaccctttggccccctcagggacccagacagcgtggtcctctgcctcttggccattgacgaggaggaggaggatgacatcgccctgcaaatccacttcacgctcatccagtccttctgctgtgacaacgacatcaacatcgtgcgggtgtcgggcatgcagcgcctggcgcagctcctgggagagccggccgagacccagggcaccaccgaggcccgagacctgcattgtctcctggtcacggtgagtcgggcctctgccctgccccgccacgcccgggcacctgggccggtgtttgtcaacaaagtcgggctgactggtcctgcacagctcagcgctcagccacgtttggcatgtcccgtgggcagccgggctggggcctcctcacccaggaagctattttgagcctgactgttttccccacacaggggccccgggagagggaggctccactaaaccccttcttttccctcctacagaaccctcacacggacgcctggaagagccacggcttggtggaggtggccagctactgcgaagaaagccggggcaacaaccagtgggtcccctacatctctcttcaggaacgctgaggcccttcccagcagcagaatctgttgagttgctgccacaaacaaaaaatacaataaatatttgaaccccctcccccccagcacaacccccccaaaacaacccaacccacgaggaccatcgggggcagagtcgttggagactgaagaggaagaggaggaggagaaggggagtgagcggccgcccccagggcggagatccaggagctggcggccgccgatccgatggagaaggggggacccaggccagcaggagacaggacccccgaagctgaggccttgggatggagcagaagccggagtggcggggcacgctgccgccttccccatcacggagggtccagactgtccactcgggggtggagtgagactgactgcaagccccaccctccttgagactggagctggcgtctgcatacgagagacttggttgaacttggttggtccttgtctgcaccctcgacaagaccacactttgggacttgggagctggggctgaagttgctctgtacccatgaactcccagtttgcgaattatagagacaatctattttgttacttgcacttgttattcgaaccactgagagcgagatgggaagcatagatatctatatttttatttctactatgagggccttgtaataaatttctaaagcctctggttgcttgtatgttttcggcttctagaacaactaggacccctgccccctccccggggacacgcttcaccccccacaacccccgccagctcaccaggaagtgttacttaagcccctgttagcagctccaggctcccgtgcagaaacagtaccccttctctccgcagcaggcgccgccaccgactccaacaaatctatgcctctttttttttttccttctcctcctaccctgcagcaattaagagaccggtttattacgaaacctggccgccgtgccaccactgttactggctgtgcaggagccaaccccaagctctgggcacatatggaggcatttcagcgggagggggtgctggctgcagcccctgaccgcctaggcggccaccgcagcccaaggtccggatcggtcaagggggcacctggtaccacacagcgaggtgagctcagggcttgcaaggaagagcgcttttggaggcttccccagggagtgcccccccagcccaccacagccttctccatcccaggataggcctctcttttgcactaaagaaaaaaactttttttatttccgcaaactaaaatcaacaagcagaaaaataccccaggaagtcggcctccgggccagccgggcttggcgcagtgctgcgttttgcctgtaaaccgaaactgcgagccctggccagccacctcctacttctcccaaagttgcaggcgcggtggtgactccccctgccccgggctgggagcgtggcccagcccttccgtgcccggcctcagtcttcccgccccgggtctgcagagtgggcccgccctggccaggcgccgggacgacctcggttcccctctgccctgcagcccccaagcctgggaactaggggggagtggggagggggtggggtggtcctgcccgcaggccgcgacctttccacggagcctcacgtgggcgcatgaggaaaaccccagcggctccctaggagtcacggggatcgggggagccccgacgggggagggagagagagaaggagggggaagtcccagagggagaagcggggaggggagaggatcccgcctggggctaggaggaggggagaactgaagtggggagaggggagcccaagaaggggaaggggaatcccccacagccctgaaccaacagggaaaccccgggaggggggtagacaggtaggagtcccgaaggggttgggggaggggagaatggaggcgaagaggcgggagccccgagggggtagggggtgatggagtggggatccctgagatggagcccaagaggggagggcacctgggaagagtgacagagggcgaggggctcttgagggattggggtgcgggagaacatgtggggccaaaacccaagggggctccaggtggggaaggaccaggtggggcaagggtgcgcctagcggcggcctggaaaagctctggcttttctttttctttcttttgagacagtctcactccatcgcccaggctggagtgcagtggcacgatctcgcctccctgcagcctccacctcctgggttcaagcgattctcctgagtagctgggaccacaaggacccactaccacacccactagtttttgtatttttagtagagatggggtttcaccatgttggccagactggtctcaaactcctgacctcacgcccgacttggcctgcaaaatgctgagattacaggtctgagccaccgctcccagtctctggctcttcgttggtcaacctcgtagggtagggaggcgaggccagctcggagggctatgcccccggggatcggatggtctgtctccatccggattgttccattcttgctcctcggtctctagaactgtgcagcaggatctcaggctcctgagccccaagtggagacagggcatggaggggccccagtggtgggaccctcagccaggaccttcacctgtctgtgcctcagtttctccctctgaaaaatgggggataatgctacctagctcatagattgttgaggaggttaaatgatatatagattcctgggccggccctgtggctcactctctgtaatcccaagactttgggaggcttgggggaggtggggaggaatccctgaacccaggagtttgagaccagcatgggcaaacatagagagatccagatctctacaaaaaaatttaaaaattagctgggcatggtggtgtgggcctgtggtcccagctacttgggagcctgaggcgggaggagcacttgagccctgaagattgaggctgcagtgagctgtgatggcaccaccacactccagcctgggtgacagagtgagaccctgtctcaaaacaaacaaacaaacaaacaacagaccctgaaatatagattccttgaccggcttccttcaatgtacttccagaatcatggttttttttccccaatttttaaaagatcattcatttaaaaattttagatttagctgggcgtggtggcttatgcctgttatggtttgaattgtcttccccacaaaagatgtggaaggctgggcgcagtggctcacgcctgtaatcccaggactgtgggaggccgaggtgggcggatcatgtgaggtcaagagttcgagaccagcctggccaagagggtgaaaccctgtctctactaaaaatacgaaagttagctgggtgtggtggcgtgcacctgtagtcccagctactcgggaggctgaggcaggagaatggcgtgaacccgggaggcggagcttgcagtgagctgagattgcgccactgcactccagcctgggcgacagagagagactccatctcaaaaaaaagaaaaaaaagaaaagaaatagggtctcactatattacccagtctggtctcaaattcctggccttaagtgatcctccagccacggcctcccacagtgttgggattacaggcgggagccaccgcgcccggccctctcctattgttagtactcttgcagttgttattgttgttgtcatttatgaaagtattccacggtctccctgaccgaagccagggaagtacaggaactggctttgaaggatgctgtttcattgaattaataatagcagctaggttgattcagtcttctctgggactcaactgtaaacacctataaacttactgtggccccgtgaggaagatgctgttgtcccatcttcccaaagaagagactgaggctcagaatggaggagccacagcctggctaggagtcttgaattgtcggtgtctggctggtcagtctctggggaaaactctgggttgagaggacccgggggatgcaacacccccagctccccagaccccttcaagttcacgctgggtcaggaaggagtagtcacagggcaccaagcctcagtcagctggcacgggccgttctgggctcccacactcaggactggatgccaggatacatgtgtgtattccttggacgacggtgagtggaagagttggcagtgcccaccgcaggttgcaggcagacacgcttcccaggccggactcgtgaagttgggtgcgtgctcaccccagggtgcccacgatggcctgtgtctgaacctacactcacaggctgaaacgcatacacacgctcacaccccgctatgcagtcatattcacagctggagacatggacatgttcacacgcacgcacacacatactgcatgccacggacacagagtcgcctgcaagaggacacatgagtccatagaaatgcctcccatggccgggtgtggtggctcacacctgtaaccccagtactttgggaggccaaggagggtggatcatctgaggtcaggagtttgagaccagcctggccaacatggtgcaaccctgtctctactaaaaatacaaaaaaattagccaggcgtggtggtggatgtctgtaatcccaactacttgggaggctgagacagaagaatcgcttgaacccaggaggtggaggttgcagtgagctgagattgtgccactgcactccagcctgggtgagagagagagactccatctctcagatgatccacctgcctcagcctcccaaagttctgggattacaggtgtgaaccacttcactcggccttattttttaattttttttcctttgagacagggtctcactcagttgtccaggctggaatgcagtgctgcgatcttggctcactgtaacctctgcctcctcagctcaaacgatcctcccacctcagcctcctgagtagctggggttacagacgtgtgccaccacgcccagccattgttgttttttgagacagtgtctccctctgtcatccaggctgaagtgcagtgatgtggtcatagctcgctgcagcctcaacctgctgggctccagtgatcctcctgccttggcctcccaaaatggtgggagccacacgcccagccactatctgctttttatagaaagagaatgtggagttcagataggtgcagtgacttgtccaaagtcacaaggtacaatggcagagccaggaaccaaaccaaggccagcgtggctcaaagtactgttttttcagacacacgcatgcacacacacacacacacatgcacacacgcatgcacacacacacatgcacacacacgcacacacacgtacacacacatacacagacatgcacacatgtacacacacatacacagtatatatactgtatatatgtacacatatatagtacgtatacacactatatataaatataatgatatatattattgagatatagttcatataccataaattcacccctttaaagtctttaactaagtggtttttagtatattcacaaaattgtgcaaccatcaccactattgaattccagaatattttcatcacccccaaaagaagccctgtcaccattagcagtcactcttcacgccccctcccccaacccctgacaaccgctactccacattttttccatgaattcacctgttctggacatttcatataaatgaaatcataaaatgtgcaaccttttgtgtctggcttcttttgcttgcacactgttttgggggctcatccatgatgttgtatgtatcggtatcaaagtttgaacatactggatgcagtggcggaggcctgtaatcccagtactttggaaaactgaggcaggaggattgcttgagcccaggagttcgagaccagcctgggcaacatggcaagacctcgtttctaaaaaaaaacaaaaacaaaaacaaaaattaagccaggtgtggtggtgcatgcctgtaatcttagctactggggaggctaaggtgggaggattgcttaagcctgggaggctggagctgcagtgagctgtgatcacaccactgcactccagcctgggcaacagagtgagaccctgcctcaaaacacaaaagatttgaacttgtgtggcctgccctgtgcctctgctccccagaacatgtgcctgggaatcccagcagtatactagcaccctcacgtgtggacggccatccctgggaaggcactcagagtcacacacacaattcgtatttagtgaccagccactatgtgtgggccttgcacatgcaaatcctcaacccacatgttgtttatacacctggctctctaacatccaaccagggcctgtgctgatgcctctggccagaacactcttccctacctttctcctagttaacacctactctccttttgctcacatctcagatgccacctcctccaggaagccctccaaacaagacctggaatgacctctgtactatctctgcccacctgcccttcttggtacttgcaccatttatttgtttgtttgttttttgagacagagtcttgctctgcccagcccctgcacccatttgtaatgacatatttataatcctgttatttgcttcttgtctatcttctgcgtgaagctgcagactcccagagggaggggagaaggtctgtttttctcacccccagatccctagtggctagcccagaacctgggacacaggcggcacttcataaatgcttatggcataaagactcagtcaagtctgtatgatgagaggttgaactgctgatgaccttctgtgtccatgctccagcacagacagtttcggccctaagggacacacgttgatctgccaggtgctgggtcctggccaggtagagtgacacctctcagctcaggaaggctggaacctggctctgtggaggaggccagccgcgtggcctcgggcaagttgcttcacctctttgcattcagttttcttgttggtgcaatggggatgccaatggtggtgcccatctctctcggggctgttgtgaacattaaattaattacattatgcaaagcatttagaacggggagaagcttgcagaaaagttagctattattagtgagctagtacaccatacaatgctttctgcctgtacatgaatatctgcatagctgcctgttaatgtgagttggaatttgtctctgaatctctgcacaccgcggtgtgttgggccatgaggacttgtgctgctatgtgggaacacagcaatatacgtacacgtgtggctgttgctacaattcttggcatccttggagtgagccctggacacccagaactcctgaccaactggggactcgtgattgcaccttcctcatcaccccaaataggaggtccatagctgctgatgctgctcacctctcccccagagtggccccagggcacgacctctgtggctggtggtttggaggtctatttattattttttgagacagtctcactgtgttgcccaggctgtagtgcagtggcatgatcatagctcactgcagctcaagcaattctcccacctcaacctcccaagcagctgggattacaggtgcctgccaccacgcctggctaatttttgtatttttagtaaagacagggttgcgccatggtggccaagctggtctcaaactcctgacctcaagtgatccacctgccttggcctcccaaagtgctgggattacagatgtgagtcaccgagccctgccattttttatttttatttttctaagagatggggtcttcctctgtcacccaggctggagtgcagtggtgctgtcacagttcactgcagcctcgacctcccagactcaagcaatcctcccacctcagtctccccagcctcccaagtagcgggaactataggcaagtaccaccatgactggctagggtttcactatgttgcctaggctggtctcgaactcctggcctcaggtgatgtccccatctcagcctcccaaagtgctggggttacaggcctgagccatcacaccctgcctgactcattcaatatttatttagcccctactgtgtgcgagggcctgtgttaggcttagaaaaacaagagagaacgagataaagagaggcatctgtgtgtatgggtgtgtgggtgtctgttgcgtgttgagtatgaattctcattcacgtttccagcatgcgtggccggaaagacttgggtgggtgtttttgtgtgaggatgttatggtttgaattgtgtcctccacaaaagatgtggaaggctgggcatggtaactcacgcttgtaatctcaacactttgggaggccaaggcaggagaatctcttgaggccaggagttcgagaccagtctgggcaacagagagagaccttgattctacaaaaaataaaaaaagatatggccgggcacagtggttcacgcctgtaatcccagcactttgggaggtcgaggtgggcggatcacaaagtcaagagattgagaccatcctggccaacacagtgaaaccctgtctctactaaaaatacaaaatttagctgagtgtggtggagtgcacctgtagtcccagttactcgagaggttgaggcaagagagttgcttgaacccggtaggcagaggctgcagtgagctgagatcgcgccactgcactccagcctgtcgacagagcaagactccatctaaataaaaaaaaaaaagatattagcctggcatggtggcatgtctcaaaaaacactgaaggaatcaaagcacacacccagggccacctggtctcagacacacagatgtgtgcatttgcatatcaaccccctattcatgggtgaacgtgcatctgcaatgacgcagtccagagcacagaaggaaagagacgatggtgcctccctgaagaggtccctgctgtgggcatctggggctgagccccgtagggaactgtgagaggtgtggtcacaatggggcaagacagccagtgggggcatctacttattttattttattttattttattttattttattttattttattttatttttgagacggagtctcactctgtcgcccgggctggagtgcagtggcgcgatctcggctcattgcaagctccgcctcccgggttcacgccattctcctgcctcagcctcccgagtagctgggactacaggcgcccgtcaccacgcccggctaattttttaatattttttagtagagacggggtttcaccatgttagccaggatggtctcgatctcctgaccttgtgatccgcctgtgtcggcctcccaaagtgctgggattacaggcgtgagccaccgcgcccggctattttattttgaggcacagttttgctcttgttgcccaggctggagtgcagtggcacgatctcagctcactcaggttcaaccgattctcctgcctcagcctcccaaatagctgggattacaggtgcgtgccaccttgcccggctaattttttgtatttttagtagagatggggtttcgccatgttggccaggctggtctcgaactcctgaccatgtgatctgcctgcctcggcctcccaaagtgctagattacaagtgtgagccaccgtgcccggctggcatctacttattaaccaactgcatcccccgtttgaggggtgttctggggtgttgactccctggtacttcctgcctacccagagggggttctcggtgagtgtctgtacgcaggtgggtgcctgcacacagtaggtgctgcatgtctctgggtgtctgcacacagtaggcatggcacgcaggtggggctctgcacacagtaggccttgcgtgcaataaagacgctgcacacagcaggtgtttgcatgaaggagaggggctgcacgcagtaggtttgcacactgttagagaaagaccccaggcaaagggacacgggaagccgttggactgtaggaaattgtcggaagccagctcccaggtggccaaggggacatagcagcatctgccatgcccttttgtgcactttaagcactggttctcagacttcagggtgcattggcaaccccctgggtacccccctttttttttttttaaatagagacaggatctccctatgttgcccaggctggtctggaactcctgggctcaaaggatcctcctgcctcccaaaatgcgaggattacaggtgtgagccaccatggccggcccctgggtacactttcaatgtggtgggttggatgttgtggcaggggaccctaaaccgggtctccccttttctaggacacagcagaaggaatgcagaggcttcctgagccgtcactcttccttactttctcccgggacccccttctctctgcagaccaccgccaagagcccagccctcagagccccagaactccctgcagcttcccagctctaggccttggcccctgtgatctccacctcgtggtcggggcagtgcccagccagggctccggggaggcgagggaggaaccagggtgggtctccttggaggaagcagagagtcacggagtcttgcagagagaggctcagagccctgcacgtcactttctccagcccccaccccagagcctggagcatgctccccggacatgtaggtcacgcgacccacagctttacagatccctagggatccaggagggacccccgagacccagaacgacccatagccacacagtgggaaggccaaggacctgctccccaggacgctgggccagggagaccgcaggcacacgggacagccacaccagagctgcatctggagaaggggtggggggtttcctctcgccgctcctcgctattctttccctacattgttccgttccgtgctcccagttcccaccccactccctccacccggacgccggcggttcccaggccccggagccggggtgcattgggggtgggggtggggtagagtgaggggcctcgtgaagagcgctgcgggccaagaccctcttgcgcatgtgacgagagcgcacgagtgtgggagcttcggcctgcgctcacaggcgtgtgcgtggggaagtgtttgggccgccgtgtacacagcaggcacgccataaacgcttcttggatggctccatgcgagggaagggagggagggcagagttcaggccctacagggaggaaaagggaggggcggaggcctggctttaggtttgaatctccgcggcttactagctccagcagctcagcaaaagcgtgactcagtttccctcgtccataaaagggaaagccgaatcgccctcccacgtgtcgaggtgaaactagacagtgcactaaggcacttagcaaaacgcgctgccttgagaacccttattacgccttccttccttccacctcaccccctggccagacactctgggggtggagaggggcgctgacccaggccccagacgcccctcccgtccgccctccctagcaggcaggagtcccggctttcccgttccttaaattggataattggagacagaggcgggtgctcgagacggagaaatccccaagtgggcgaaaggcaaggggcctgtcctagtttccctgcactgggggcccccaccctcgccagcgctccctccggtgcgccctgggcgcgcagtctgtgcgctcgggagcccccagcgccggctgtcgaccccctccagagcccggcggtgccagcctccctctgttgcccgccaggcgcggtgtctgcggccgccccggcaggaggggttggggggtccgggccggcggcagctccggcggcgtctccctcctccaagcccctggcggcgggcggccgggccgagggcggggcgtctgcacagaccctccttttgtgagcggcgccttccccgggcggcctggcgcgcagggctcgggcactgcgccagggcccggaatagcctccctgcccggccgcccgccccacgccccggcggagccgcctgacctgcccggtcgggcgcagaagagcctggggccgcggtggcacaggaaccgggtgcgtgctcagctgcacggggctgcagccgctactctccgctgggccggcactggacgcgtgcagccgggcctactgtgcgcagcccgtcttttgtgtgaaaacgcccgctgtgtgcagatctccgtcttcgtgcagggcctactgtgcgccgcaccccccttccatgcaaagcctactgtgtgcagaaccccatttgcctgcaatgcctactgtgtgcggcccctctcctgcgtgcaaacgcctgctgtgtgtgacccttttcttgcatgcaaggcctactgtgtgcagagccctaccttcttgcagtgcctacagggtgcagcccctctcctgcgtgcagacgtccactgtgtgcagatcgctgtcttcgcgctgggcttactgtatgcagcacctctcttccatgcaaagcccactgtgtgcagagccccacctggccgcaatgcctactgcgtgcagacacccagatacatacaaaaccgactgtgtgcaggcatccacctacatgcaaacacctgcacctgcactcgtgcaaacacccaccgtgcacaggcacccactgacaaacattcatgtgaggagcccccaagctcccacactcccaaacggccttgtctttttgtctttttttttttttttttttttttttaagatggaatcttgctctgtcgcccaggctggggtgcagtggcacgatctcaactcactgcatcctccccctcccaggctcaagcgattctcctgtctcagcctcctgagtagctgggactacaggcgcgcgccaccacgcccagcttgtattgtatttttagttttgtatttttagcagagatggggtttcaccatgttggccaggctggtcttgaactcctgacctcaggtgatccacttgcctcggcctcccaaagtgctgggattacaggggtgagccaccgtgcccagcctcatttttttttttttttttttgagatgaagtctcgctcttgtgccccaggctggagtgcaatggcgcaatctcagctcactgtaacctccacctcctgggttcaagaaattcttctgcctcagcctcccgagtagctgggattacaggcacctgccaccacgcccggctaatttttgtatttttaatagagacggcatttcaccatgttggccaggctggtctcgaactcctgacctcaggtgatctgcctgtctcagcctcccaaactgctgggattacaggcatgtgagccatggtgcccggcacaaacagccttgtccatgcaagcacaagcacccacatgtgtctaagaccctggtgtgcacacctgcactctgacctgcactgcgtgttcccactagggaaatgcaaatatttctaagctccaatgctcactccacagagccccgaggcctgtgaatacccgcggtatacagagatccatgaggtgccagtactcaaactgtggaagcctgcacgtgctgatttggggtgggagtagagtgcagggaactcatctgtgtgcagcccctttctctgggccctttgtgtgcacctcagtttaccccacctgggtaagagactctgccctgctggagtctcttctggttctgactttgaagggctccaaggtgtggggggaaagggggctgcattccctctctgctgtgtgcctctgggtggtggattcaggctagcagggctgggggctgggcctccaggcccttcccggaagcccgggaagcaggtgcaagggtaggcagtctccacgggcagggcgccagaccttggcttccctgaaactgggcacagcagctgggagaggtttccgggcccgcctggccccacctggcccctggcactttcggaagatgggcggggcaggcaggcaatgccaaggacgggcgaggcccagcctgcacaagagtcgccggtgaacctgtgcgcacacacgggtgtgcatgtatatgtgtgcacacgtgcatgggccatgctgatgtgagttctgtaccccacctacaaacgggtgtgctcatgaacacgtgcagggtcaccctggcacatgaaccgtgcagcacaggcaatggcccagcggtaattcacccatagcggtgacaggaaagagatgcttgtctgctttgctcactgtgcgtctccagcaccccacagctggttggcacttggtgaatatttgctgagtggacaaatgagtgaatacacgaacacatcattttgcaaatatgtactgaatgtctctactctgcataccagacatttgcacatcttcaaacaacaaaaagatcctgggaaacgacattctagacatccacggggtgggaataagcccacgcctgagagtacacactcatgtccaggaaacacctgagtccactttgatttgttcacctccagaagccagagcctggtgcccacacacaggccctcatgcagagacacgcattttctttcttttttttctttctttctttttttttttgagatggagttttgctcagttgcccgggctggagtgcagtggcgcgatctcggcccactgcaagctccgcctcccgggctcacgccactctcctgcctcagcctcccgagtagctgggactacaggcgcctgccaccacgcctggctaatttttcatatttttttagtagagacggggtttcaccttgttagccaggatggtctcgatctcctgaccttgtgatctgcccacctcggtctcccaaagtgctgggattacaggcgtgagccactgcgcccggccgcattttattttttcttttctttctttcttttttttttttgagatggagtctcgctccatcgcccaggctggagtgcaatggtgtgatctcggctcaccgcaaactccgcctccggcttcaagtgattctcccacctcagcctcccgagtagctgggattacaggtgcatgccaccacatctggctaatttttgtatttttagtagagacagggtttcaccttgttggtcaggctggtcttgaacccctgacctcaagtgatctgcccaccttggcctcctaaagtgctgggataacagacgtcagccaccgtgcccggccaggattttggacacacaaatatcccctctcttcccctgcaagcctacctgtgctacccaccccagccatcccctcctgaggtgtctgtccttccatgcctgaaggggttcatgggagtgtggggagtcctacaccccacctgtgattttccatcatttgagttctcctatggctcagaccattgcctgcaggaagctccagaaacagccagggttggtgggattagaactgcacaggtggggaggtgatgcccatataccctaagaaactatccttccatttcacagccggagaaaccgaggcccagagacaggaaggtcttcttgttgagctaagaagagaaatagagggatgataaacggatgccctgactgggccccctcaaccatctcctcttgcagccagaaacagtaggttcctaccgccaacaagggtggggacaggaaggtgggggaccagggtgggaggaggagatgggagtgaggccctggggggaggtggagcctatgtcctggagacagacacagaggtgggcggtccggagacacccacctcctcagacaggcacgggctctggcagctggtgacagagacacaatctggggcacataggcactgtctgtccctcctgccgccgatcttcctccccagcctctgatggggattctaggggctgctggggcccctgcaattgttttggcatgagtgtgcatacctgtgtgtttgtgtgttgggtgcacatgctttatttttattttcattttatttattccatttcatttcatttatttcatttcatttcattttttgagactgagtcgtgttctgtcacccaggctggagtgcagtggcactatctcaactcattgcaacctccgcctcccaggttcaagcgattctcctgcttcagcctccggagtagctgggactacaggtgcccaccaccatggccggctaattttttgtatttttagtagagatgaggtttcaccacgctgatcaggctggtctcaaacacctgacctcaagtgatccgcccacctgggcctcccaaagtgctgggattacaggcataaaccaccgcgcccggcctcactgagcatgttttgaaggcgagtgcgttcctcttgactgctgaactttcattctatgaaccgacctccgttgacctgttcccctctgaatggaggggtatttgagctcttcccaggttttggtgatgaggaacaaagctgctacgtgcatttacctcctggtctctgtgtgctcctaagttgtgtatttctttcagatagtaccaagagaagtgaggttgctgggtccccgtaaccttatagggtaaatactattattacatccactttgttgatcgggagaatagacgccgccaggcctcctgtctctcgctttcacacaaaggcacatacggcagacacggacccccatcactcatccatcactttcccatcactcaccgcagaccctccaggacccacgcagaaacccagggctcccccacggtgcacgcagcacccaggctgcccgccctccacccagggccgcgtcacgcccgacacccccggaacagacgcctatgaggcctgcagctccagacgggctgcagacacacagcgatttgttcatctttccagccaccccgtctggtcctgacagtaattagctcccagactggtggggagacggtgaacagcctgagagtcatcgcccacggctccacgcccacaggccacgggcaccgggagagagggtgaatgagtgtgtgtgtgtgtgtgagtgtgtgtgtccggaatctgtactctccagccagggctccccatcctcctgcaaagggccagcaccgtgcacgggtacccacggcgccttccaaggggaacgtgcacaggcatacccactgttcattccacgaaggatcgtgcacacgcatgcctacctttgcatttcacgcgggattgtgcacacgcatgtccaccgtgccttccacgcgggatcgtgcacacgcatgtccacgaactcctgcacacctacacccaccaggcctgcccatgcgatgcgtccctgcagacccactgtggacgcctgcttgtcggcgtcctgcgcatcccgcgtgagtggagtgtgcactcgtggagggggcgactgagtgcggggcaagcgcaagcgcaagcacactgggctcgcggagggtggagagaggccgtgcgcgttcccggggctggcgcggaggtggggtcagcggcgcgggagaacgccccgccccgctaccgccagcccggaagacccacggcggcgggcgctggcgtcacgggtttccactggggccccggcgccggggccgggattccctggcgcaggaacgcccgtgacggcggcgcctgcctgcgtcggccacgctgggaggtttgagcctggggatgacatcagcccctgcgtttctggagctggcccgggcgggacggggacttggagaaagcagtgacacccactttcgttgactgccaacccgtgcagagcgcttagtgcgtgtccgaccgtgagctgagcgctgtgatgcgggtgctgttaatgtcccattgcacagatggggaaactgaggccggcgcactgcccgccccgccgggcccccagagtgagggcccggggctgggagcagccttttcccagcgccctctgcagtgtagagtcccaccagcttgtctcccgctctctcctgcacaagccggctcagagagggtctgcgggtgtcctggcaccacccagcaagttgggtgctgcagccagctctgtccatacagttggtctctgcccagctgcggtggccaggggcggtgcctgagccagggcgcccgggcggcccggtggggtgtgcccagccgctgccttcctgctgacgccggtgccaagggatctaaatatagcctgggaggaggcaagggctatttttaacgcgagtggcttggcccctcccagttcccgggtcaggagccctttggtccaggattttggggaggggcaggggcgagggggagccaggggccccacacccgcctgggcctgcccctctgcccacacctggccctggaagactctaggggacgaagggccgtagagggagggcagggtgggggggctgtcgcaggtcacctttcttaaacgccacctcctctctagctgccgaccagccctggccttttgttgggcccagagactgctttctattttgggaaggtgttggaataatttccttggctatttttagccggttcggggattcctccactcaggctggccgccctgcctctcctcctcctcctcctcctcctagtcgtcttcctcctcccggcagacccaagggcggcctccttcatggagggcagtcagggacacacagtccctgagccagacccagaatggggagacccctatatttcctgggtcggggagggaagggagctctgaagggcgttcccacgttccaggtgagcaggactttcagacctctgggaatccatgacgccaggtatctgaattctgtctccagggcagggtggggcgacccagcagcctctgacctttcacctcctttcagggttgtcacaggaaagtggcctgctgagaacagaccttgactcccacatccctaggctaggggctcccatgttcccaagaggaagatcagtgtgatgagggtaaactgaggcacagaggggacactgggatgggacacatcttgggctcattccctgatggtttcatttccttccacattctacctttgtttttaatttttttttttgattgttttgagacaagacggagtctcactctgtcacccaggctggaagagtatgcagtggcacaatctcggctctctgcaacctctgtcctctgggttcaagcgattctccagcttcagccccctgagtagctgggattacaggtgcacgccaccatgcccagctaagttttgtatttttagtagagacggggtttcaccatgttggccaggctggtctcgaactcctgaccgcaggtgatccacctgcctctcctcccagagtgataggattacatgcgtgagccactgtgcctggcagcagcgccgtcatagcttatggcagccttgacttcctgggctcaagtgatgcccccaactcagcctcctgagtagtgaggcctatataggcatgtaccacgatgactggctaatttttgaaaatttttactagagatggggtctctctgtgttgcccaggctggtcttgaactcctgggctcaagtgatccttccaccttggcctcccaaagtgctgggattccaggcgtgagccaccgggaccagccctcatgctgccttttaacagctaagcaaccttggggcgatgacttcacctctatgtgcctctttcaggaaagggggtgacagtcacatggactaatggtaaataggtgagggaatatatgaaaggtcttagaacaagctcctggcagaatggagctgagggtcctggaaaggacgctgggatatggctggctgcaggacagaggaacatcccgggtgctggctggttccacattttgagaggacacacccccttacttatcccagtccgtgaggctggcgagagtgaccccggcgtttcagatcaggaaactgagaccctgggataatttcccaggcccagggtctcatgacagctgacacacaggaggccagcacagtcccctggctcccccgggccgtattccacagctgctccgcattctttcaccggtgccctcactcatgcagcaagcatttgtgagcaccgtatgagtttcctcccgctgctgtaacaaatcactgccaacccagtggctggaaacaacacagagttattatctgacaagtctggaggccaggaatccaaaatcagtctccctgggctccaaatcaagctgtgagcagggctgggccctcctggaggatccaggggagaacctggcttccacgtttgccagcatttagaggcagctgcttccctcagcttggggcctcttcctccacgttcatggctggccgtgcagcctcttccagtctctgactctcacctcccaccacctcttatttattattattattattattattattattaattttagtggagttttgctctttttgcccaggctggagtgcgatggtgccatcttggctcactgcaacctccacctcccgggctcaagtgattctcctgcctcagcctcccgagtagctgggattacaggcatgcgccaccacgcccagctaattttgtatttttagtagagatggggtttctccatattggccgggctggtctcgaactcttgatctcaggtgatctgcctgtcctggcctcccaaagtgctgggattacaggcataagccactgcacctggttgtttgtttgttttaagaaaaatctttttcactgtgcaagttgatttttttttttttaagagatagggtcttgctccatagcccaggccggagtgcagtgatgcaatcatagctcactgaagctgcaaactcctgggctcaaggaatcctcccacctcagcctcccgagtagctgggaccacaggcactcaccaccatgtctggctaattttttaaaattattttttgtagagtcggggtcttgctatgttgcccagactggtctccaaatcctgagctcaagtgatcctcatgtcttggcctcccaaagtgctgggattacaggcgtgagccaccacgcctggcccgcaagttgattttttatgagtatattgcttctctccaagggcggatggcctgaccgggataagacccgtgaacagatagtaaatgtgggtttggcatttggcaggaaatgcttgtggaattcaggaggcaactgtcatttatctgtcctgtatgccagctggatatcaagtacatttctgtatcttaagaccatcagccagttttatttattggatgcttattaagtacttaatgccaatttaatatcttcacagccaccttagtgctaataatcatcctcaccttacagatgaggaaactgacatggagccatgacttgtcgaaagtccccggccgggcgtggtggctcacgcctgtaatcccagcactttgggaggctgaggtgggtggatcatctgaggttaggagattgagaccatcctggctaacacggtgaaaccccgtctctactaaaaatacaaaaaataagccgggcgtggtggcgggcgcctgtagtcccagctactcgggaggctgaggcaggagaatggcgtgaacccgggaggcagaacttgcagtgagccgagatcgcgccactgcactccagtctgggcaacagagagactccgtttcaaaaaaacaaagaaagaaagtccctcagccaagttggtggcagaagctacccagccggttctgtttccatttggccttgctgctgcctcttgcttgaatgctttcagggaccatgcaggcacactcctcagctatccccttgttctggtcctccagcaacagtcttgggaagttagtgggttccacaatcctgagcccaagctcagtgcagctctcccaccctcaggtgtcttctgcaaacaaaggacctcccagagcccacggagggggaatgtttcgaaagtgtgctggccaggaaagagaccagacgtgaaccacacttcctccctccctctgctccagatgtctgcaccagaggtggtcgggaggaggctgccagatagacaagacaacaggagcgttggaaaagggcggcttccactactacctcccaatgtggggatgtgactggaagagcagctccatgacccaaggatgggactttggctttcttttatccccaagccagcccgtgacatgccttctgctagatggatggctgtctgcagctctgaccctgtagttttgcgcagattatctgtcccatgaaacgtttagactctggcctgagaattcctcctttcgtcttctttttttttttttttttttttgagacggagtctcgctctgttgcccaggctggagtgcagtggcgcgatctcagctcactgcaaccccccgccccccaggttcaagcaattctcctgcctcagcctcctgagtagctgggattacaggcacgtgcaagcatgcctggctaattttttgtattttttagtagagacagggtttcatcgtgttagccaggatggtcccgatctcctgacctcgtgatccgcctgcctcggcctcccaaagtgttgagattacaggcgtgagccaccgcgcctggctgagaattcttcctttctagaggccactgcatgtggccttcgaggggaggggtcgtgggacaggagtagttaccaaaggcagaacccttttagattcccctgattctcacagagtgggctggaggcacgtaaaccacctgataatgcaagccgggttttcctgaatgttctctggagtaggtcgctcatcctaggtgaaagcagatcttttccctaggatctgaggctttagacgcaggaattgtcactgccatttgctccagaatcccagtgctgctccgactgtaattgctcattttactgatcaattgagacagacaaatgcagttagaagacacagggatgacctctggaaggtccaagggaccagagtgaatgttgtcgccaaagatcctgtaagtgagaggcggagccggggccgagactggacacctgtcagcaagctcattcccccaacgacaccctggcctgtcttggcgtacgctggcagtctgcgttctgaacaggggagatgtttctttctcaaccttggcttggagttctccccagagtgataaatgttggcgagaaagagcggcacattcttttttttttttttttttagacagagtttcactcttgtcgcccaggctggagtgccacggtgcgatcttggctcaccacaacctccgcctcccgggttcaagcgattcttcttcctcagcctcccgagtagctgggattacaggcatgagccaccacgcccggctaattttgtatttttagtagagacggggtttctccgtgtgggtcaggctggtctcaaactcctgaccacaggtgatccgcccgcctcagcctcccacagtgctgggattacaggcttgagccactgcgtccggccaggagtggcacattcttagggccggctcacccgtgaggccctacatcactctttccactgtaaaccctgtggtggctgctacagatcagccacaagtgcagaaagcgctgaacccgacgcggccacccagggggagcccccatcccggagactttgctgtgccctcccaggcccctcgtgggattttttctcttttctttggatccctggcgggggtcggagagggtgtgggagggcgcagaataaaccctgagcctgcctcattggctgcctgggctccagagccctgccgttgcttgtggaggactttctgggaatcacgtggactggccagaagggctgggaactggagagcaggcaaggattctggaagaggggagatcccagtgggagggatttgaggctggcagtgggtcagagacagaagtccagatggacaggtttaaagtctctgcttaaggcggggcgtggtggctcacgcctgtaattccagcactttggcaggccaaggcgggtggatcacttgaggtcaggagtttgagaccagcctgggcaacatactgaaaccccgtctctactaaaaatacaaaaattagtcaggagtggtggcgagcgcctgtaatcccagctactcaggaggctgaggcaagagaatcacttgaacccaggaggcggaggttgcagtgagccgagattgcgccactgcactccagcctgggtgacagagtgagactctgtctcaaaaaaaataaataaaataaataaataaaaataaaagtctctgcttagataagcactatgcttctgctgcctgtaaatggctcttttaccctttctttagcatgaaaacaaattttctaattattataaacaaaatgtgtgcaatgtggaggctggctgttggtactcattatccttctcttgcttgacgtcaagtgaaagataaattgttgcctctggcccttcccaggaccaaagagaaggcacgacgtcaaatgcatctccttggatttgggaggcaatgtatacttaatttgggtgtgcttccccggcctggttgaggaggccatcgtgccctccctccatcagtctgcgctctgtggcatctgtggcgtggacccttctttgctttgcagaggcagagtgtctgcattcggcatcgtacccagcccagtccagagtttacagtaggggtcacccttggaggtctgtgttctgtgggttttacccaatgcatgaggttacatatccaccatgacagtgtcacatacagtaatttcactgctccccaaatcctctgtgctccacctattcacccttatccccgcttccttcaacctgggtaacccctgattttttttttttttttttttttttgatggagtctcattctgtcacccaggctggagtacagcagtgccatctgggctcactgcaacctccgcctcccgggttcgagcgattctcctgcctcagcctcccgagtagctgggattacaggcctgcaccaccacatccagctaattttgtattttcagtagagacagggtttctccatgttggtcaggctggtctccaactcccgacctcaggtgatccacccgcctcagcctcccaaagtgctgggataacaggcgtgagccaccactgatgtttttactcatgtatagctttgccttttgcggaatcttttctagttgggatcgtagcatggaggctgtgaaggctgcagcttctttcacttgtttcccggtgtattccagatttcaggagttattcgtacaactcggcttgtgacttcacatcactccagcctcttgtttctgttgttatgtctccttctctgactgaccttcctgccaccctcttacaaggaccctgtgatgacattgggcctacctggataatccagacaagatctctaattttttttttttttttgagacagagtcttgctctgttgcccaggctagagtacagcggctccatctcggctcactgcaacctctgcctcccgggttcaagccattctcctgcctcagcctcccaagtagctgggactagaggtgcccgccaccacgcctggcgaattttttgtacttttttttagtaaagacggggtttcaccgtgttagccaggatggtctcgatctcctgacctcgtgatccacccgccttggcctcccaaagtgctgggattacaggcgtgagccacccgcctggcaatttttaattattattatttcttttttaaaaatatgaaatgcttcatgtcatccttacgcaggggcaatactaatctttgcatccttccaactttttgaatatgtgctactgaagtgagcatgttataagggtaaggttttgtttttttgttttttttttttaattttgagatggagttttgctcttgttgcaatgatgcgatctcatctcactgcaatctctgcctcccaggttcaagtgattctcctgccttagcctcctgagtagctgggatcacaggcatgagccaccacgtccagctaattttgtacttctagtagagacggggtttcgccatgttggttaggctggtctcgaactcctgacctcaggtgatccacccaccttggcctcccaaagtgctgggattacaggcatgaaccactgtacccggccagtaaaggctttaaatgtttaatgacttcaatctgttgtgactttttttctgtcctaatagcttaagcaaaccccttctggaatatctgaaaaatatgttggtgggtgtatgagacagggccgacttcatgggtgtgcgacttgtgagtcacccagggccccatgatcagaagcgctgtgtggtcggaagggccccacccttggtttaatgctgctgtcattgtcttgaaattcttaaacatttttgaaaaagggccctgtgttttcattttttactgagccctgcacgttacatggccggtcctggtatgagaccctcttatgctcccctgcagagcccctcgacctcacccactcacgggctagctccgtcaggtgttgacggatgtcactcaggtgtgagctctgcacctgagctcccccctgcacacaggcagccacaaccagtcagtgcagaggtgagcctgtggccagtgaggagccggtgagtcaacctcctcccgcctacgggccctgagacgccggctccgtgagcttgcggggtcgagggcgcctatattaagccaaggctgaggcagtgacacaccctcttatgggcctgctctcgctccctgcttcattgtcctggtctctccctctcgtatggaggatcagactggactcccccagaaaacaagagcatatgaaccttctgtctcaggctctgcctctggggagcccaagctatggttggctgaatagcagccggcaaagatgtccttgttctaattccgggagcacaggggtatgtcaccttccacggcaacagagactctgcaggtgcgattgagtgaaggactctgagatgggagagcagcctggatgatctggagtccccagtgtcctcacagggtccctcataagaaagactagaagaggctgcgctcctggctgcgaaggtggaggaaggggccccgagctgagggatgtgagcccctcgacgctgggaaagacgaggagttggattcttttttttttttttaatttaaaataatttaattttaagtctgggatacatgtgcagatctaaatgatagtctaggagaaaatatttgcaacacctataacagatcagaattcccaagcctgcaggtttgttacataggtaaacatgtgccatggtggtttgctgcaatcaacccgtcacctaggtattaagccccacatgttgctgggcgcggcggctcatgcctgtaatcccagcactttgggaggccgaggtgggtggcttgctcgaggtcaggagttcgagaccagcctgacccacatggtgaaaccccgtctctactaaaaatacaaaaattagctgggtgtggtggcggacgcctgtaatcccagctactcaggaggctgaggcaggagaatcacttgaacctgggaagcagaggttgcagtgagctgagattgcaccattgcactccagcctgggtgacagagcgagactccgtctcaaacaaacaaaaagccccacgtacgtcagctctttatcctggagccctccctcccttccccctcacctcaccccccagcggccccagtgtgtgttgttcccctccctgtgtccatgtgttctcagtattcagctcccacttataagtgagaacatgtggtgtttgattttctgttctgtgttagtttgctgaggacaacggcttccagctccatccatgtccctgcaaaggacatgatcccgttcctttttgtggctgcataatattccatgctgtgtatgtacaacatttttgtcttttgagacagagtcttgctcttgtcacccaggctggagtgcaatggcgggatctcagctcactgcaacttccacctcccgggttcaagcaattctcctgcctcagcctcccgagtagctgggactacaggtgcccaccaccacactcagctaattttttgtattttcagtagaaacagggtttcaccgtgttagccaggatggtctcgatttcctgacctcgcgatccaccctcctcagcctcccaaagtgctgggattacaggcgtgagccaccgcgcccagccaggatgtatcattttaaatcttagtttgtggaacagttttctaactaagcatgtcacaaaacctagagaatcaagaaaggaacatgttgatgagttttgtgtgccagacataaaaatctaaatgatagtctaggagaaaatatttgcaacacttgtaacagaccagaattaacaagcctgcgtaaaaagtgtctttcatcccaaagaaatacgcaagtgatttaattaggaaataaacagactgggtgcagtggcacacacctgtaatcccagcactttaggaggccaagataggaggatcacctgagcccaggaattggagaccagcctgggcaacacagcaagaactcatctttaaaatttttttttaaattagctgagtgtggtggtgcttccatgtagtcccagctacttgggaggctgaggtgggaagactgcttgaatttgggagatcaaggctgcagtgagctatgatagcaccactggactccagcccgggcgacagagccagcaggccctgtctcaaaaaagaaaaaaaaaaaaaaaagaaaagaaaagaaacaaaaagtatgaataggcattttacatatgagggaataaaaatgtctcataattctagggaccggtacacacacatatgctggaatgcacacacacatccaagtgtgtgtacagaaattaatatgtaggctgggtacggtggctaatgcctgtaatcccagcactttgggaggctgaggaaggcggatcacctgaggtcaggagttcgagaccagcctgaccaacatggcgaaatcccgtctttcctaaaaatacaaaattagctgggcgtggtgggtgcatgcctgtaatcccagctaaatcccagctactcgggaggctgaggcaggagaatcacttgaatccgggaggtggaggttgcagtgagccgagaacacgccattgcactctatcctgggcggcaagagtgaaactccgtgtcaaaaaaaaagaaagaaagaaacatgttcataaggcactttattgaaagatagtgtgtaaaagtagcaaaactcagaaataatctaaatgtccatcaatagtatataatttttttttttttgagatggagtctcgctctgttgcccaggctggagtgcagtggcacaatcttggctcactgcaacctctgccccccaggttcattgcctgcctcatcttcctgagtagctgggatcacaggtgcctgccaccatgcctggctaatttttattttttattttggtatttttagtagagacggggtttcaccatgttgaccaggctggccttgaactcctgacctcaggtgatcctcccgcctcggcctctcaaagtgctgggatttcaggtgtgagccaccgcgtccggctaagcatgtaaattaaattactctggagttgttaaaatgcactgatttttaaaaaattattatttttatatcttttttgttttccttcataaaaatgcaatgacttagcaagctgtcggtcataggaagttaagcgaaaaaaaaaaaaagctaagccagcctcagagcagtctgtgttgagtgagtccagttttaaaaacaaatggcaagtgttggtatgaaatagtgccgatctccattacagaagacggtcttgggcacatgtgcgggagccctacggtctggctgaaaatgctgcccagttctggccgtaccactttctagctgtggactcaagggagttgtttaccttctgtcagtccatgtttattcatctgcacaatcaatgcgtagaaccatagcccttacctcacagcgtttccgggaggatcagatgacacaatccgaggaaatgaaccattattgctacttactgtcactgctttcttctgaggccaacgtttgggcacgcctagaagtttgaaggatttgcctcagctgtgaacaaatggtggctacaggtgctgagaatgggtctgaagaagggcgtggagggatcttccctcccctcccctccccacccctccccttctctttctctctccctccctccctctcttctttttctttctctctctcccctccctccctccctctctctctctttctttttttctctctctcccctcccccccttctctcttttctttctttctcttttttgacagagtctcactttgtcgcccagtctggagtgcagtggtgtgatctcagctcactgcaacctctgcctcccagattcacgccattctcctgcctcagcctcctgagtagctgggattacaggcgtgcgccaccacgcccggctaatttttgtatatttagtggagacggcgtttcaccgtgttagccaggatggtctccatctcctgacctcgtgatccgcccgcctcggcctcccaaagtgctgggattacaggcatgagccaccgtgcccggccgcatgtgggtttttcaatggctattatttaagcatcttccatgtcctttgtgtgtgtgtgtgtggtgtgtgtgttttgtgttttttttgtttttgacaagagtctcgctctgttgcccaggctggagtgcagtggcgtgatctcagctcactacaacctccacctcccaggttcaaacgattctcctgcctcagcctcctgggtaggtgggactacaggtgcatgccaccacacccagctaatgtttctatttttagtggaaacggggtttcaccatgttggccaggctggtctcgaacttctgacctcaggtgatccgcccacctcagtcttccaaagtgctgggattacaggcatgagccacagtgcccagccaaggatgacttttgaatgctgtatgattttatgtaacttcttcttcttcttctttttttttgagacggagtttcactcttgttgcccaggctggagtgtaatggcacgacctcagctcactgcaacctccgcctcccaggttcaagtgattctcctgcctcagcctcccgagtagctgggattacaagcatgggccaccacacccggctaatttttttgtatttttagtagaaacggggtttctccatgttggtcaggctactcttgaactcccgacctgaggtgatctgccagcctcggcctcccaaagcattgggattacaggcgtgagccactgtgcccggcctattttatgtaacttctatagttattatattttgttttggggaccaggaaaagaaattgtaaacctttttggcttatttcccatgtctttttttctgtgcattaaaacaaaacaaaacaaataaaacaaggctgggcgtggtggctcacgcctgtaatcccagcactttgggaggctgaggcgggcggatcatgaggtcaggagatcgagaccgtcctggctaacacggtgaaaccctgtctctactgaaaatacaaaaaattagccgggcgtggtggtgggcgcctgtagtcccagctactcgggagactgaggcaggagaatggcctgaacccgggaggcggagcttgcagtgagctgagatcgcgccactgcactccagcctgggcgacagagcgagactccgtctcaaaaaacaaaacaaaacaaaacaaaaaacccattgctaataatgtgtacgattttgcatgtaagtttttcagtgactgtattattaggctggtgcaaaagtaattgcgattttgccgttaaaaaggtgaaaaccacaactacttttgcaccaacctaatatttaagcatcttccatgtccttaaatacaaatcgtaatggataaatacaaggtggtctgtctggaaaaaggaatattactcagccatgaaaaggaacgaagctctgacataggctagcacctggatgaaccctgaggacatcacggccagggagaggtgccagacataaaaggccacacaatacatgatcccatttatgtgaactgcgaaggacaggctaatccaccgagacagtaaagggattcacggtggcctgcggctggggaggggtggagagtgactgctgatggggatgggatgtctttggggtgatgacagtattctggaactacacagaggtgatggttacacaactcctacattttacattttatttaattaattaattaatttatttatttctgagacggggtcttgctcttgttgcccaggctggagtgcagtggtgcgatctcggctcactgcaacctccacctcccaggttcaagcgattctcctgcctcaacctcctgagtagctgggattacaggtgcccgccatcactcccggctaatttttgtatttttaatagagacgggctttcaccatgttggccaggctggtctcaagctcctgacatcaggtgatccacctgcctcagcctcccaaagtgctgggatagctgtcacgagccactgcgcccagccgccaaaacactttcagggaaggttgtacccgcgtagaggtcctttggcagcatgtgacagcttgtatcctcctgtgttgctgccagcatagagcccaaaagctcttcttaatctttctttgttttgttttgttttgagacagagtctcactcttgtttcccaggctagagtgcagtggtgcgatctcggctcactgcaacctctgccttctgggttcaagcaactctcctgcctcagcctcccaagcagctgggattacaggcacccgccaccatactcagctaatttttatatttttagtagagacagggtttcactgtgttgcccaggctggtgttgaactcctgacctcagatgatccgcccacctcagcctcccaaagtgctgggattacaggtgtgaaccattgagcccagccttcctcctagattttcttttcttttctttttttttgagacacagtctcactctgttgcccaggctggagtgcagtggcgcaatctcggctcactgcaacctccgcctcctgggttcaagtgattctcccgcctcagcctcccgagtagctgggactacaggagcccaccaccacgcccagctaatttttttttttgtatttttagtagagacaaggtttcaccatgttggccaggctggtctcgaacacctgacctcatgatccgccctcctcagccttccaaagtgctgggattgcaggtgtgagccaccgcgcccggccttttttttttttttgagatggagtcttgatctgttgcccaggctggagtgcagtggcgtgatcttggttcactgcagcctttgcctcttgggttcaagcaattctcctgcctcatcctcttgaggagctgggattataatcacttgccatcacggccagctaatttttatagttttagcagagacgtggtttcaccgtgttgaccaggctggtctcgaactcctgacctcaggtgacccgcccgcctcgggcttccaaagtgctgggattccaggcctgagccaccgcgcccggcccctcctagatgttctaagtacaaatccgaaagcccactgggcctgaacgtccctggtttgtggtgctgcctccaggggtcccctcctgttacctcttccctgggccggtgaagggagggtggacgggatggtgtggggccgcgggtccccatgcctggagccaagcctggggcatctgcttgcatgctaggagctccctccccagcaaggcccgggccagagagagaaggaacagcccagagccaggagaaaagggagagtgaggctttttattgtgtatgaattcacgtggtatcgacaactccacacaatattaaaacactgcgagaaagtgggtgcggcacacctggaattttaaaaaagtcagaaataaaaacaaccagacatcccaatgcagatggcatagaacctgctagaaccacaggcggcggctggaaacaggagacaggtctttacgaaggttagatgggcagcggttccgtggacagaggaggaggcgcggctggccggcatatggcttctgtgcagagggcctggcctcaggccgtggactttttaataagtgaccccttgaggaagggcgtggtggctccacctccacccggaagcccccccgggtcactcacgggcggacaggtgtgtgacggccctctcctacctgccccagaacttgggcaggacgggctgttaacttggagatggatgcgtggcctggaggcctagcgttgcgcctcggacacggtggccggcccgtcaaagggaccacgcagaaggagggaaacaggagcaccttccgccctggcccagccgccccgtttatgtccccagaggccagaggtcgcagctgagctatctgtgcttggcctggggttacccctggggagggtgggagaggggtgagggttctggctccttcctggagagaggagggcaggggaggcggagctggtccgggaaggtgcccaggtgggtcacaacagggtcggggcctggcccgctgtggcccttcacctggctactggtgtctcgctcagcagcggggaaggcccgtgggagacccaggctacagaaggagaaacggccttctctctcccacccgacgctgccttgtgtgtgtgcgtgggtgggggtgagtgtccttaactctcttttcccctggcgtagctgagagaggcttgtccccccaaggctagagctgctgctgccacccccgcccgccagctccccgtctggaggtgcacgcgcgctcctggaaacgcccataaaacatgcgttcaccccagggattcccggcagaaaagcacatgtggcggtcggtgtgtgcactcgggtgccacgtctgcaaaggtattttccacagtgtggtcactgaagtctactcaagaaaaaaaaaagtggagaattttttttttaatcccccaagctagaaagaaacccacaggcttctggcaatggccacctccctggggtccgggagatggtggggtctggacagctcagggaacccaaggccctgtggacagtgaaggagaggccagcctgtccttcccctccccgagcctcagtttacctggaacgctcagcccgtttaaccccaccatctgcaccagcctaggagccccggctgcctggggctgcgtctctgcagcagcctccgttccctgctggcatttctggggtcacattgtgaggacacaccagtggggccgggcttggcacagctgtgccccctcctccctctgccctggcagcgggggctcggggattaaggcctcttttaaggaaaaacggggtggggtgtgtttgttcccagttaccaagatggcttgttggaaagggtggaggcaggcgggctctccctgcctggggtcctcccagggtctctggaacaggcttttgtcccttcctgccattcctgctatgcgtggtggggacgcccacaccccaaaccctgccggctcccagcccaaccacaggaggctgcagtctccgggagcctctggggctctcccgggccaacagcaggtttggcgggtagggctccccgaagccccagccctcccggacctgccgtagagagctgggtgccgggggtggggagcccggctgtggcctgtgggagctgcccgaggttgaggagtggaggtcactcccccgacacctgcacacacacccggagccctctagccttggcgaggtgggaaccctggcagtcaccagctcaggaagtgagccaagcagggatccccgcctcacgggcctgcacggaggacctgggcggccgtccaggaaccctctcggcacgggttcttagacgcctgtctccactggggccggagggacaggactaggctagttttattctactacttgcttctaggccagccccgtggagggggtcggggcggccaggcctcctgcgatcagggctgcgtggggtccatctcaggtgtggccgcaggtgatgccggcaggccctggaagatgtggctgcacctgctcccgtccgtgccgcagaggaggacgcagtcatctttcagaagcctccccccgaccccatgacatcttcgatttccacttgccgctgggaggagtggcccatcctgcgtctaaggcatctcccggcctcagacagccgtcctgggttgcacgggggtggaaaagcaaaaagatcgggttcgagcgacagggtaacgttttgagcggacgttttgatctccgggacaacgtctcacctcccagagtccttcagagtcactccaagatcatggaacaattttgtacacacagcagcacagggtagccccacccgccctgccgcggctccccagcctgcattttctgtttgaaaaacgtctatggtggatgccagagggtaggacaacctggaagagccaaggatggtcaaagcctctcccagccacgcggatgcctcatgcttaaaacacactgggcgcggtggctcatgcctgtaatcccagcactttgggaggccgaggtgggcggatcccgaggtcaggagtttgagagcggcctggccaatacggtgaaaccccgtctctactaaaaatacaacaattagccgggcgtagtggcacacgcctgtagtctcagctactcgggaggctgaggcaggagaatcgcttgaaccggggaggcagaggttgcggtgagctgaaatcatgcagctgcactccagcctgggtaacaagaatgaaactccatctcaaaaaaagaaaaaaaaaaaaaatccaaaaacatgatgggccgggccggtgacggcttccctggggcaagtcccgaaaacccatttctggcacagaggggaccctgcagaaaggacccatggctaacatcatgcaggggagtcacacttggcaacttttcatagacgaagccccctccagacccccacactccatcgtgcattcattgcaggatcgtgcagtttagcgacgggttcaaccatcacaatccgagtttagccgtatggagtaacaattttttaaataaagagatatttccaaaaaacttcatgatgtcacctcccgccccccatctcaattttacctctacttaaaaacaacacaaagcattccagtgaccctatgaagtctttttaccaatggccaattctcccggaactattgccaccgggcgaagtcacctccctttccccctcggcgccggtccacaattgaaacggcaatcgagagttttaaaaaattgttaccccatcgctgggggatttcagttattccgaacgggaagtggccgtaaagcctccatcccttttggcccaaactgagagggccatggggtcggacctgaaaattcatctccacctacaaggtccattctaccccatccgggcggtgggaacgccttttttggcggggagaggggggatttcttttggaattaaaggttttggggacttgagatgttttgtttgagctaattactgaatgatgccctgcctgagacagagacagagacagagagagagagagagaaagagagagagagagagagaacatatgagaacacagttataaaataatacaaggtttcttgtccttaaaggggttctccgaggcagggactccgaccagcagggggtcgttccgggcatgttgctcacagtagctcatgaggtcagacgccgctttggagacctgtgtttgagcacaaggaggagacagaggagacataagaagaggctggcacacccgggttcacagcagcaccattcccaagagccacaggcggaaacagctcaggagcccattgatgggggcgtgggcaaacagtgcggcccgtccacacgctggaatattactcagccatgaaaaggagtgaggctctgacataggccacaacgtggatgcatctcaagggcctcatgctcagtgagagatgccagacacagaaggccacacagtgtgtgatcccatttctttcttttttttttttgagacagagactctatttgtcgcccaggctctagtgcagtggcacgatctcggctcactgcaacctccacctcgcgggttcaagtgattctcctgcctcagcctcccgagtagctgggattaccttcatgcaccaccacacccagctaatttttgtatttttagtagagacagggtttcaccatgttgatcaggctggtctcgaactcctgacctcgcgatatgcctgcctcagcctcccacagtgctgggattacaggtgtgagccactgcgcccggccgtgtgatcccatttctatgaaatgtccaggacaggcctatccacagagacaggaaggggatgcgtgggtgccggtgctggggagtgatggctgatgggggacagggtttccttttggggtgatggaatgtcctggaataaacgtgattggatgcacagcattgtgactatattaaatatcactagtggtaaactttatatgtgtcttggccaggtgcggtggctcacacctgtaatcccaacatgttgggaggcggaggcgggaggatcacttgagcccaggagtttgagaccagcctaggcaacacagtgaggccctatctctacaaaaaatacaaaaatgagccaggcatagtgatgtgggcatctgtagtcccagctaactggggggctgaggctggaggattgcttgagcctgggaggttaaggctgcagtgagtcaagattacaccattgcactccagcctgggggatggagcaagaccctgtctcaattaagataaataaacaaataaataaatttatgtgtgtcttttcccaaaattaaaaaaagaaaaatgcagtggtgtgatcactgcaatctcttgctccccgggttcaagcaattctcctgcctcagcctcctgagtagctgggactacaggtgcctgccaccacgcccagctaatttttgtatttttagtagagacgggtttcagcatgttggccaggctggtctcaaactcctaacttcaagtgatccacctgccttagcctcccaaagtgctgggattacaggcgtgagccacggcacctggcctaaaaaatatttttttaaaaaagaaaaggctgagcttccttcagcaagcgttgccagattttgaacacaaagggtcagggacagatggaccccgttttcggagtccaagacctcattctcaccccaaggaaggaaggtcctgataggaaaacgctgcctgcacatttgatgagcttgagggaggtttcacggtgacacccggccagggggctgggcccggtgaggacgagataagcccgtctccatgtttctcttgcagcctgaaccccctgatgactccaaccctctgaggggctgatgcttccggtcacaggagggaccccctgccccgggctgctgccagcccgccccaggctacacgcccgtctctcctggccatgcctttgggggtgccgctgccactccccgcttagctcaccccagcagggctggggctggggtgtccggtgtcctgggtcaggctacacggggacacgtccatctggccctggatctcatcccgtaaccggtaactgtgtctctgtgggactcagcgacctttctctccttgctttctttcctggaaggcgagagggcgatcacagggggaggattagatgtggcagaggtgaggggatgatccgagaaggatcgcagtgtcgcttcacggaggtgcctttgttatctgtttttgagacagggtctcgctctgtcccccaggctggaatgcagtggtgctatcatagctcaatgcagcctccacctcctgggctcaagtgattctcccgcctcagctgggagtacctgagtagctgggactacgggagtgagccactacacctggccataattttcatttttattatttatttatttttttgagacagagtctcactctgtcagccaggctggagtgcagtggcgtgatctcggctcactgcaacctccgccccctgggtccaagcaattctcccacctcagcctcccaagtggctgggactccaggcgcacgccaccacgccagggtaatttttgtatttttagtagagacggggtttcaccatgttggccaggctggtctcaatctcctgacctcaggtggcccgcccacctcagcctgccaaagtgctgggattacaggcatgagccaccgtgcctggcctggccataatttttagaataattttctggtacagatgaggtctcactatgttgctcaggctggtctcgaactcctaggctcaggcgaccctcccgcctagacctctgaaagtgctggggttacaggcatgagccgcctcgcctggccagtacctctgcatcccagatcctctgtcctcctttggaccccaaggatacctgggacctgggcccttcaaacggccaggagcctgtgggacagctttggggtcttgcccagctgggcagccgggggacgctcatgcccacagagtgagcccgccggctgcggcctgtgatgactcggacctggcctgctttctagacttctatttgggaagcggccctcctggacgacagaaatagcctccagaccccgaaaatagctggcattgtggctccagcacgtggcaccttggcaccaccccccatgcccactgcgctgggctggtgagccccaagatcgtcgccgttgaggttctgtggttctggtcgccgcgttggagctggggatgtaaaacctcaggcgggactgggagtggggacgggtcaaatcctggctccccccgaggcccgacattcaaaggggcggtgggggcccctcctcaacatcaaacagggcaggatgagtcaccgccctccgcccgggctgggggctggcacccactcgtaaaaggaaaaccacttcaaccagggctttctctcttttcagcccgaaggaatgctttgaatgctcaggtctgtcctcagcagtcagattgctggaacattcagacacctcgtgggaggcagacccctcccctactggttggatcccggccagcagcagcgtgatggggtctgggagggctcagagctgcgctggagggagactcaccggccgatcagaaccacctgtgccacctggccagcagggacgactctgtccgcctccccgctgggagcaaagcaagggccggtcaccccttcctaataaattcccgtggccaataatgacaagctggtgacaggtgctggagagctgagttctgagtggatacgtggggtgatggctgattttatgggtgcactagggcgggccatggtgccccagggtttggttaaatgtttttttgtttttgttttttttctgagatggagtctcaccctgtcgcttggggttggagggcagtggcgcaatctcagctcactgcaacctctgcctctcgggttcaagctattctcctgactcagtctcccaagtagctgggactataggagcctgccaccacgcctggctaatttttttgtaattttagtagagatggggtttcaccatattggccaggctggtctcgaactcctgaccttgtgatccgcccacctcagcctcccaaagtgctgcgattccaggcgtgagtcaccgtgcctggccagttaaatgtttttttagatgttgctgtgaaggttgtttttttcttgtttcttttttttttttttttttttttgagatagagtctcgctctgttccccaggctggagtgcaatggtgcgatctcggctcactgcaacctccacctcccaggttcaagtgattctcctgcctcagcctcccaaatagctgggattacaggcatgcaccaccatacccgggtaatcttttttttgtatttttaggagagacggggtttcaccatgttggccaggctggtctcgaacccctgacctcaggtgatctgcccacctcagcttcccaaagtgctggaattataagtgtgagtcaccgcgctcagcctgttttttattttgtagagatggggtcttgctatgttgttgcccaggctggaattgaacgcctgacctcaagtgatcctcctgcctcggcctcccaatgtgctgggattacagctgtgagccactgtgcctcacatgcaaaattttttttttttttttgatgtgattcacatttaaatccgtagacttcaagcacagcaggtgaccgtctgtaatgcagatgggcctcatctaatcagttgaagggcttaagagaaaaagcctggggtccttccaggaggagggaactctgcctccaggtggccttggggttccagctgcagcaccaactcttccctgggtctccagcctgctggcctacactgcagatttcagagcttgccttaaaataaatctcgacaaggcgcagcctcaagtgtgatccttgtaaaaaacttcaaacgggccaggcatggtggctcacgcctggaatcccaggactttgggaggccgaggcaggcggatcacctgaagttaggagttcaagaccagcctgggcaacatggcgaaacgccgtctctactaaaaatacaaaaaattagccaggcatggtggtgcatgcctgtaatcccagctatttgggaggttgaggcagaagaattgcttgaacccgggaggcagaggttgcagtgagccgagatcgcgccactgcactccagcctgggtgacagagcaagactccgtctcaaacaaacaaaacaaacaaatccttcaaacaacacagaagtgaaaagtagatacgacatgcagtctcctcccgcctgggactgtgtctctcagtttaatttgcatctgtcattgccaaggagctggacagatcaatgcagatgaggacgacaaagcgctctgtcacgatgaccgtctccacggggccccagtgtgtttacaaagcacgttacattgctgcacgaaggcaggagataggtgttagatcagctgcctctttctgccgaggaaatggaggctcagagaggttaagggagggcctcaaggtcacacagcaagagacacagttggggtgcaagcctctgccctcctgccgagcctcctgttcatcatttgcggggcccccaagggtctctcccctcctcttcctgatgcccgctgggctcaccttgatgcgctcaatcccggcttctatgcgtagctgttccaccagcttccgggcctgggctatgttgttagtggctgacattgtctgccatcagctctgggccccgttgttcagagagctgtgggggaagcagaggggtgtgggtcaaagttcaggtcaggcctctgggtggcagcaggggcgcccggccttggctcaaccttcccgactctaggcacggccactttgcctctgggtggggaccaggggcctccgtgtacaaagagctggcactcgtttaactctcagcatagagcctggcacgcggtcagccgtcacaatcctctgtgggagtttgcagaacgagagaatgaaagggcgaaggcaggctgggcgtggtggctcacgcctgtaatcccagcactttgggaggctgaggcaggtggatcatgaggtcaggagatcgagaccatcctggctaacacggtgaaacctcatcgttactaaaaaaaaaaaaaaaaatacaaaaattagccaggcatggtggtgggtgcctatagtcccagctactctggaggctgaggcaggagaatgacgtgaacccgggaggtggagcttgcagtgagccgagatggtgcccctgcactccagcctggacgacagagcaagactccgtctcaaaaaaaaaaataaagaaaaaataaagaaagggcaaaggcaataggccaggccctctggagaagggaggacccacgcaggctcccgggtggcctgcctcagtccatggcaggggttcttgccctccaggggacactgggtgatatctggggacatctgtggctgtggggggtgctcctggcatggagtgggttgggtggaggccagggacattgctcagctccctgcagtgccccggacggccccacgccagggaaggatccgaacgcgatatccatagtacccaggggagaccctgggtcagggcagggatcacagcagaacccctggtgactgtccccctccgtgtttttttttttttttttttgagacagagtcttgctctgttgcccaggctggagtgcagtggtgtgatctcggctcactgcaacctctgcctcccgggttcaagcgattctcctgcctcagcctcccgagtagctgggattacaggcacgtgccaccacacccggctaatttttgtatttttagtacagacagcgtttcaccatgttggccaggctggtcttgaactcctgacctcaggtgatccaccctcctcggcctctcaaagtgctgggatgacaggtgtgagcccggcctctcctccgtgtccttcatattgaaccagtcaggagcccatgctgttgcttcttgaattctcctggaaaaacccaggacctcaacagggcagacgatcacaggacgcagagtctcttgggagtccgtggaatccccagatctcatctggggatgactctgccctccatggagcactgggtgatgtctgggacatttgtggctgtcatgacttgggggtgctcctggcagggagtgggtggaggccacggatgctgctcagcaccctgcagtgcccaggacggccccgctccagggaacgatccagccccacgtgtcagtagtgtccagcctagagaaacctgcttcgtaggacccagtgagggggttggtgctgatgggggtggcaggggcaggggccaggttcaagagtcctgggcagccgcagtcccagccgggcgtctgtgagcagttaattaagccgcaccctgtctctgtcataactcatggcatcgctgtctgttttgcagagccaggcagccgcagagaagtcaaggcagattccagagttctcaaaaaatgcctacttagtgataagaaggaaaggactggccgggcgcggtggctcacgcctgtaatcccagcactttgggaggccgaggcgggcgggtcacaaggtcaggagatcaagaccatcctggctaacacggtgaaaccccgtctcccgggcgtggtggcgggtgcctgtagtcccagctactcgggaggctgaggcaggagaatggggtgaacccggaaggcggagcttgcagtgagcagagatcacgccactgcactccagcctgggggacagagtgagactctgtctcaaaaaaaaaaaaaaaaaaaaaaaaaaaagaaggaaaggaccatccatgcataccacaccgcaggggaatctccagggcctgggatgtgtagcatgcttctgtttgtgtaatgtgtttaagaggactttttttagacagagtctcgctctgttgcccaggctggagtgcagtggcatgatctcagctcactgcaagctccgcttctccagctccagcgatactctcacttctgcctcctgagtagctgggattacaggtgcatgtgccaccatgcctggctaatctttgtatttttggtagagacatggttttaccatgttggccaggctggtctcaaactcctggcctcaagtgatctgcctgtctcgacctcccaaagtgctgggattacaggcatgagccaccatgcccggcccaaggacgaaattttagaaatggagaacagattagcggctgccagggatcagggaggggcaggggctgggagggagataggtctctgtataaaagggcaacacagccaggcatggtggctcttgcctgtaataccagcactttgggaggctgagatgcgaggatcacttgagtccaggagtttgaggccagcctaggcaacatagcaagaccccctctctacaaaaaattagaaaattagctgggcatgggtagcgcactcctgtggtcccagctacttgggaggctgaggtgggaggatcacttgagcctgggaggttgaggccagactgggcaatttagtgagaccccatctctgaataaataataaaagggcaacacgaatgatccctgttagtgcctcaactacggtgatgaatccacaagcctacatgagtgataaactcacagagagcctcacacactcacacaccagcgggcacaatactgaatactgtggaacctgagtgaggctggtgggtgtgtgactgtctggctgcgatcctgcccatagctttaccaaatgttaccaccagggacggccggggaatgacacacagaattcctctacattctttgttagcactggctgtgactccacggcgatctcaataaaaggggcaattaaacaaaaaatccctttgacaccgcccagcctccttggtttccagcagacgtcccacccccactttttgggggcagagaaggcccaatctgtctgctctggaggcagagcccacgtgtggccgctcagagggctctgattccagagagcttcaaagcagccacaaaacatccaactcagggaaaaccgcccttggttgggcttaaaaatacctaaattactcagtgctaaaaatacgtgcacgcagagaacaaacgggctggccgcacctcctgttttccttggaaggccagggggtcctatttagcatccacagtcaggagtgtccacccagaccctgggcccctgctgccctgggcagccaccgcccgcaatttccatgtgagcatcaggtcctgagccgtgctggcttttctgttttgggcgaaattccctgcgagatgctgcctttgggctgggtaataacccaggcctgccaggaaggccagagaggactgcgctgtgtgtgtgtgtctatgtttatttgcatgtatgtcaatgatgcacatgtgactgtacacgtgtgtacacgtggtgtgcatgtcagtgtgcacatgtgtatgtgtgtgcacatgtgcatgtatgtgtaccttgcgtgtgcatgtatgtgtgtatgtgtatactggcattcatgagtgtgcatatatgcgtgtgtgcacacatatctgcatgtgtatgtgtacctgcatatgcatgggtgtgcacgtcagcatgcatatgagtgtgcatccttgcatgtgtgtacatgtgcatgtgtctatatgagtgcatgtacacatctacgtgtgtgcgtctgcatatgagtgtgtgcataggtgcatttgcatacgtgcatgtgtgtggacatgcatgccagtgtgcacgtgtgtatgtgcacgtgtgtggacacggcactgcatgtgcgtgtgcgcacacgtgtgtgggcatgcatgtcactatgggtgtgtgcatgcgtgttggcgtgtgtgtacgtcactgtaggtgcgtggatatgtgcgtgcgtgggtgtgtacatgtgtctgcatgtgtacatgcgtgtgcgtgtgtgtgcgcacgggagtgcatgtggatgcttgggctgagatgccgagactcagacacagattgcatcacccatgcagtcgcctccctaagtccccgtctcggtggtgtcaccagccggcactgactcaggagcagccatgcccccagcagaggactaagccaacagcagcagaactggccacgcactgagtcagccaggaacgcccctcccaactgcctccctgcagaggcgcacgggtgccgggcaccccgacctgaatgagcttgcctcggggcccgtggcccggggaagctgtgggaggggcgggagcaggcagctccgggggcagggccaggtggtcaaaggtgcacacagtccccacggctccctcctgacggtcgggctctgcctcggtgcacaggctcctgcaggcaggcaaggctccaggccaggctctccaaaaataaaactgaagagggacgccgcccggccccgcgctggcctcctagcaaaaggctcatagccacacccgagtctaagcccgcctcgtgcagaaaaatcccactcgcgcctgaaagtcaagaaggatgagggtacccccccactccaggacatagtggaaatctgtggtcgctcagggaagggtgaccagccccgaaacagagcagacctgagctgatcagacacgaggctccagtgcacagaagggctgaacaaaaccgcaggacaggagctggcagcaccggcagggagggaggtgggaccacagggacccccagggagcagccgccctctaaccccttgctccggcagttatcccgagggcaaaaaatgaaaagaaataaaaatctacatatagaaaggcgtttataattgcgttatgtgtaagagtgaaaagttagaatgaaagcaagtgctctgcctcttttttttttgagtcggagtctcgctctgtcgcccaggctgaagtgcggtggcgcgatctcagctcactgcaacctccgccttccgggttcaagcgattctcttgcctcagcctcccgagtggctgggattacaggtgcctgcctccacgccaatttttttttttttttttgagacagagtctggctctgtctccgaggctggagtgcagtggcgcgatcttggctcactgcaacctcctcctccagggttcacgccattctcctgcttcagcttcccaagtagctgagactacaggcgcccgccaccacgcctggctaattttttatatttttagtagatacggggtttcaccgtgttagccaggatggtctcgatctcctgatcttgtgatccgcctgcctcggcctcccagagtgctgggattaaaggcgtgagccactgcgcctggccaatttttgtatttttaatagagacggggtttccccatgttggccaggctggtctcaaacgcctgacctcaggtgatccacccgcctcgacctcccaaagtgctgggattacaggcgtgagccaccgcgcctggtctactattagtttataatataaacttatactatattatactatagtattatacatttattacatatttatatattttattatatatttgtttactcatatatttatatttatactcatatttatatttatgtcatttatcatgcatttattacatatttgaagattcattcactatatattcatatcagttttgtattactaatatatagttttagtatttagtatgtattatacacttattgcatacatattttatatttattcatcatttacataatttatacattattaattatatagtttgatttctattttgacatttacattgtttgctattgattttatatttgtatttataatatatttagattactattttatatctgtatatatgtattatatagttatagaatctgttataggtttattgaatattgtttatcttaactttttttttttgagagggagtctcgctctgtcgcccaggctggagtgcagtggcacaatctcggctcactgcaacctccacctcctgagttcatgccattctcctgcctcagcctcccgagtagctgggactacaggcgcgcgccaccacaccgggctaatttttgtatttttagtagagacggggtttcaccatgttggtcaggctggtctcaaactcctgacctagtgatccacccgcctcagcctcccaaagtgctgggattacaggcgtgagccactgctcccggccctatcttaactttttattttgaaacaattatggactcaggcagttgcaaacatagtccagggagccccacgcaccctctcccggtcccctccagggcgacgtcacctgtgactatgagacactatcagaaccgggaccctgaggtcagcccaatgctgtgtctcactcagacggcaccactcccaccggccctcatctgggggtgcagagggagttttggtgtcgcgcatccctccaggaagggggcctgggttcctgcctggaggcatcgcccctctggagctgtgcccccgccctcgaacctgtccccactgggaggaggagaggaggtgaggaggtgtggcctaaacgtttgctgagcagatggctgagcagacaaagacccaaaactgcgacaaaattgacagtggtgtcagtaaagagagacacagcctagggccccagtctgcaaaatgggctgaactccgaagttcctaaaatcctaaagagacctgatctacaccgggaagtttaactcactccagtacaggccctctccctctggctggatccttttctggggtggggctgtcctgggcactgcagggtgctgggcagcatccctggtctccacccactccttgccaggaaacccccccccccaccagtgcgcccacagtcatgaccagcacaaatgtccccagacttggacaggtgtcccctgggggaaaattttaggcctttatggaactcccttatcaggagaaatcctgcagctcagagtggttcccttaggcaaaacgcaaagagtttgaacccagctgactgaaggccccaaaaataaatggtactgaatgaaaatatgctaggcgtggtggctcatgcctgtaatcccagaactttgggaggttgaggcgggtgggtcatttgaggtcaggagttcaagaccagcctggccaacatggtgaaacccccacgtctgctaaaaatacaaaaaaatgagccaggcatggtagtgcgtgcctgtaattctagctactcaggaggctgaggcacaagaatcgcttgaacccaggaggtggaggttgcagtgagccaagatcgcgccactgcactccggcctgggtgacagagtgagaccctgtctaaaaaaaaaaaaaaaaaaaaaggcctggctcagtggctcacgcctgtaatcccagcactttgggaggccgaggcgggcagatcacgaggccaggagatacagaccatcctggctaacacggtgaaaccctgtctctactaaaaaaaaaaaaaaatacaaaaaaattagccgggcatggcggcgggcacctgtagtcccagctactcaggaggctgaggcaggagaatggtctcaaaaaaaaaaaaaaaagtaaatacaggggtgtttccaaaagggctttaattttattagcatcccagaatgctttgtgactaggagaggccccacagggcgggagtcttcccccagatgtgagccccgttgcatttgaagggagtgagaccacagctcccacagaggagggaactcgggaaggtggtaggccagaaatctgcccttgctctaccaagctgtgtggccttgggaaagtttccttccctctctgagccccagtgacctctgttggaattctcagagggacactctcatctctgcaccaggcctggcccccaggttcctgtgtgaggaaacaggggttccagagtctggcaggcaggaagaggaccctcttccagggacctgtggcaactgccaaatataaacacagctgctggaaagacaaggtggctggaacatcctgcacccagcgaatgtggaagggccggtttgcccggagctcttgagaaatctcactccccgtggacttgcaccctgtcgccactcccctgacctgccctgaggctggggtgcagcagggaattgcaacagccccccaccgccggccctggagagacctgggcagagctggaagctgatcagattaaaaatcagcatggatcggattcgggatagagccacaaactgggtgtcctgaaattacccatttttgtgttggtgggtttttttgtttgtttgtttgttttttggagatgatggctcactctgtcgcccaggctggagtgcagtggcaccaactcggctcactgcaacctccgcctcccaggttcaagcgattctcttgcctcagcctcccggagtagctgggattacaagcatgcgccaccacgcccggctaatttttgtatttttagtggagacagggttttgccatgttggccaggctggtctcgaactcctgacctcaggtgatccacctgcctgggcctcccaaagtgctgggatgacaggcgtgagccaccacgcccggcccatttttgtgttgttgaacttaaagcatgagcttgggcaaatcccttcttcttctgagccatagggtaaaggtgagaggagagtcttgtaagctccgtgatgagttccagaagtccagggtgaccagtcatgcttagatcatttccgtgtcatttatggactcgatgagagacaaaagggcctctggggactgtgagttgcatcagcctcttgctgaactgacagaacattcaggtttcagggagaggtgaggtcattgccagggatcttgttcaagggataagggctgacacctgctcctgaagagggaccacacggtgcctgcctggaaatggaaaatccgggctcgcactctggctctgctcctggtttttgggtcttggcttcctcagctggaagatgagagggctcctctcaaggctgaggatgggtccccatttgtcatcctgtggctccaagatcaagaggatctagaatatccatgacctccttctaaacgacttggactttgggttaaaaatctctcttggcagattttggcttgcacaatggtggattagcagctaaggacaaacccactctcttgctgaggtccactagaaaagctggacagggccgggtgcggcggctcacgcctgtgatcccagcactgtgggaggtcgaggcgggaggatcacttgaggtcgggagtttgagaccagcctggccaacatggtgaaaccccatctctgctaaaaatacaaaaattagctgggcatggtggcacgtgcctgtagtcccagctacttgggaggctgaggcacaagaatcacttaaacccgggaggcagtggttgcagtgagctgagattgtgccactgcactccagcctgggcgacagagagagaccctgtctcaaaaaaaagaaaaaaaagctggacagggctgggtgcggtggctcaagcctgtaatcccagcactttgggaggctgaggtgggaggatcacttgaagtcgggagtttgagaccagcctggccaacatggtgaaaccccgtctctattaaaatacaaaaattagctggacgtggtggcgggtgcctgtagtcccagctactcaggaggctgaggtacaacaatcacttaaacccgggaggcagaggttgcagtgagctgacgttgtgccactgcactccagcctgggtgacagagtgagaccctgtctcaaaaaagaaagaaaagctggacagaatgtcaaagcatctgctcaagggcctgcagggttattaagataatggagaatttccagccaggatttaggggaggatcgaaagagagcctgggtttggggtcactttttcctggggttgggagggtttgctgagaggccgagtgatatttctatcagcttcacgaggccaagggtacagaaattgaggtccagggtttcctgaggagagaaggcttggtaaattcccccttggtgtgaattgggacaacttaatattgcactgtaagagtaacggtcacagctgggcacagtggctcacgcctggaatcccagcactttgggagaccgaggcaggtggatgacctgaggtcgggagttcaagactagcctggtcaacatggtgaaaccccgtctctactaaaatacaaaaattagctgggcatgatggcgggttcttgtaatcccagctagtcaggagctgagatgagagaatcccttgaatccgggagacggtggttgcagtgaaccgagatcgtgccactgtattccagctttggcagctgagtgagattccgtctcaaaaaaaaaaaaaaaaaaaaaaaaaggagtaaagatcaagaggaagcagacaggtccttctagcaactacagcagagttttgaataatctcaatccctaatattggattaaggtgatgcgagattgctggtggccccaaatgcctggaagaagtaaacataaatcccctctggaggaaaataatacgatcccaggcctcagattatttctacatgcaaatccgcaatacaggccgggcgcggtggctcacgaggtcaggagatcaagaccatcctggctaacatggtgaaaccccgtctctactaaaaatacaaaaaattagccaggcttggtggcaggcacctgtagtcccagctactccggaggctgaggcaggagagtggcatgaacccgggaggtggagcttgcagtgaaccgagatcgtgccactgcactccagcctgggtaacagagcgagactccgtcccaaaaaaaaaaaaaaatgcacaatacaatatctggcatgcaagtaagacatacgaggagccaggaccacataaacaaaaatcagcagaaataaccagcactgccaggtgcggtggctcacgcctgtaatcccagcactttgggaggcctaggcaggcggatcatgaggtcaggagatcaagaccatcctggctgacacggtgaaaccccgtctctactaaaaacacaaaaaattagccgggcgccatggcaggcgcctctagtcccagctacttgggaggctgaagcaggagaatggcatgaacccgggaggcggagcttgcagtgagctgagatcacgccactgcactgcagcctgggcaaaagaacgagactccgtctcaaaaaaaaaaacaaaaaaaaaaacaaaaaccagcactacaaagagacccacagggtttccatatactgggaattgacagagactttaaattaattgtgttaattacgttcaaagagataaaaagatgagattggaattttcgctgcaaattggaacaatggggaaaaaaaggaaccagtggatatggagaaaatgacaatatctgaaaagtaagaattcaatggaagaaataaaaattagtgaactggaagacagaacagagaaaaatatccagaatgaagcaagacgacacaaagggaaagaaactacagaagaaagagcaaaagacatagaagatgcagtgacgtctaatatacgtgttattggaacaccagaaggaggagagagagaatgaagcaggaacaatctttgaagagataatgaccaataactttctaaaactgataaaaagacctcaagccacagatttcagaatccctagaacctcaggcaaaagaaatgtcctaaaaagtggcagagaaatggccaataagcacatgaaatggtgtctaatgattagtcatgaaggaaatatgaattaaagtcatcaagagagactgcctctcaaccactagagtggcaaaaatttaaaagactgacaacactaaatatttgggaggatgtagaagaactggaggcatcatccattactgacaggaatgtgaaatagtacaaccaccatggaaaatggcttagcagtttcttataaggctgaacacatacctcacctatgacccagcaattccactcctagggatttattcaagataaataaaaacatgtctccataaaaggacttgtacgagatgttcataagcttttactcataacagcaaaacctggaaacaacccaaatgcctgtcaacgagagaataaacaagccatggcatttcacacaatgaaatacggctgcacacaaaaaaagaataaactattgagagatcaagcaacgtgtatgattctcaaaaatataaatgtattctaaaaaaataaaagataatacattattcaatattaaatattagtatttaattaatattaatatattaaatattaatattaaatatttaaaaaataaatgcctctcaaaaataaaaaaagtaaagcaacagaagctggatattagaggtgcatattatataattccatttatataaagttcaagaataggcaaaactatggtgatagaaatgaaaacagaggttgctgcctctggccagggtgttggctagaaagggccatgaaataacttctagggtgatggcgatgttctctatgttggttgagctgttggtgtacacaggtgtacacatttgctaaaatccatcaaactgtatctttaagatctgttcatcttactgcatttgaattggactttgataaaatcagttaattacaaacaaaaatcaacaaacaaaagttgccagaggaaaaaacagcagcaattaggtggacccagtgaaaatatccttcaagaattagggggaaataagggcattttcagataaacaaaaccagactttctcaccaacagacttgccttttaaaaggtaaaactagagaaagataattccagatgaaaggtagaaaatgcaggaagaagtgaaaaacaacaaaaatgttgtagagaggaaagagcttgataagataattctaaaattccagtggaaagatcaacaggaagtgaaaaactctgcaaaagccttagaacaaacacacatgaatcatatcagccttcagctcagtcctcacctccaaccaacccacaacagaagatgttctatgcttctgccttcacatttttattatacgatttttattatataattttggtcacgggattccagtgataggagttataaatattatttcaggagtttactagtgacattaattgaattttgcaattctacacacacacaaaatgaagtcagcatctgaaaaaatatatatacatcctcatccgctgtgactggtccaatgtcagtgtgataagactcaatgccagctgtccccagagacttttcttcagtccagccagcccctccttggatgtccacttcagcagtgctctgcagcctcaggcagatccccgtgtactccaccagtggcctccgctccactccccactccctccatctcctaacagctagagtgcgcttctgaaaatgcagttgaatctgttcctcccctactcagaaaccaccagcagcttccaattccttacaaaatcaagtgcaaaaatcaaggcttattgttcaattcccactgctaggaattcttcccccagctccaatcccatcaaagaactgccttctctgatgcatggctccaggatcatctcctttctcaccctgtggcctcatgagctcagcattttccagattcggaaatcctggagggggccatgagggagatggctgtccctgggaaactaagacccagagaaggtagatggcttgcccagaagatatttattataagaaattggctcacataattatggaggctgagaagccataagatgtacaattggcaagctagagagacacgagaactgatagtttctgtctgaaagccagcaggcttgagacccaagagcagatgtttccactggagtccaaaggctggaaaaacctatctgtcagcttgaaggctgccaggcaggaggaattatctcttacttagcatttttgttctattgagggctttaactgattagatgaggcccccacattggggagggggaggaatatgctttacacagcctatggttcatttcatccagaaacattctcacagacacacagaataacatttaaacagatatctgtgcaccccatggaccagtcaagttaacacataaaattaacagttacaacaatcttggagccagtcattcagcccaccacatcattctctcatggccctctgtttcttttcttgtagtatttataatttgatatttgagttgtatgcctactggactgtcagcctcatgaggccaaagatctgggggctgggtgcagtggctcatgctggtagtcccagcactttgggaggctgaggcaggaggatcacttgagcccaagagttcgagaccagcctgggcaacatggcaaaaccttgactctacaaaaaaaaaaaaaaaatacaaaaaactagttgggtgtggtggtgcacacctgtagtcccagctactcaggaggctgaggtgggagaatcgcttgagcccaggaagtggaggttgcagtgagccgagatcatgccactgcactccagcctgggtgacagagtaagaccttgtctcaaaaaaaaaaaaaaagatctgaattgttgtccccagaacctggtatataaatgttcaagagacatttgcttggggcctgaagcgggggctatgcctgtctttgcagatgtcgaccttaaccctggaagatctctttcccctgtgacatattccttctttatgatgcgggcttcaaatgttatttctttttggaacacatgttttttaatggcttctagcaccaggtgaccttgactcggaattcctagaacacggtacactcggaaagtcatatgggctgtttgttgcagactaaatatttgtgtcctcctctgaccccatcaagttcatatgttgaaatcctgggccaggtgtggtggctcatgcttggaattccagtgctttgggaggccaaggtgggagggtcacttgagcccaggagtttgaaaccagcccgagcaacagagtgaaaccccacctgtacaaaaataagaaaattaactgggtgtggtggtgtgtgcctatagtctcagctacttggatggctgaggcaggaggatcgcttgagtccaggagttggaggctgcggtgagttgtgaccacaccactgtacttcagccgggcaacagagtgagacatatctcaaaaagaaaagaaggccgggcgcggtggctcccacccgtaatcccagcactttgggaggccgaggtgggcggatcacgaggtcaggagtttgagaccagcctggccaacatgatgaaatcccgtctctactaaaaatacaaaaacagtagctgggtgtggtggcgggcgcctgtagtcccagctactcaggaggctgaggcaggagaattgcttgaacctgggaggcggcggttgcagtgagccgagattgcaccattgcactccagcctgggcaacaggagcgaaactccatctcaaaaaaaaaaagaaaagaaaagaaaagaaaagggcctcagcttgctgtttttgaaactgaagccacatgttttcttcctaatcagaactaaagtgaaagattaaaacaatcgatgttttgtttgtcttggagcaagaaatataagatctgtgtttctggcttgcagacaagagcactgccgcactgaagcgtgtgtgggtcgtatatgtgacagagcacaggaggcctgcagcgaggtcccgacagggaggactttcttgggccggagacctggttctgagcacgtcccctggacttccctgagcctcagctttctcggctgtaaagttcagaactagacagcggtttcccctgtgctccacgacaccctaggggttctgtgcagaggctgggccaccctgggttctcgggaggggctctcttggccttggggtacagtctgtgcttcctggtcggactccatttgtgtatgtgtatattttattatacagataataaaatatatatacatacatatttttatttttatttttattttttttttttgagacggagtctcgctctgtcgcccaggctggagtgcagtggtgtgatctctgctcactgcaagctccgcctcccgggttcacgccattctcctgcctcagcctcccgagtagctgggactacaggtgcccgccaccgcgcccggctaattttttgtattttgtttagtagagacggggtttcaccgtgttagccaggatggtctccatctcctgacctcgtgatccgcccgcctcggcctcccaaagtgctgggattacaagcatgagccaccgcgcccggccacatacatatttttagagccaggttctcactctgttgtccaggctggagtgcagtggtgcaatcatagctcactgcagcctccaactcccgggctcaagcgatcctcctgcctgggcctcctgagtagctgggactacaggtgcatgccactaggcctggctagttttttattttttgtagagatgaagtctctacagctatgttgcccaggctggtctcaagcgatcctcctgcctcagcctcccaaatcactggggctgcaagcgtgagccatggcacctggctataataaaataaatctgatatagaatatagaatagggtcataatatataaatgtaatcaacatataatacactgagcatgctcaaagtgtacggttctgatgggacaggaagctggaggcgggaaactggccctggagtgggggttgtggtgaagctggaggcgggaaactggccctggagtgggggttgtggtgttaggctgggacccggttacagtgactgcagggctgacaagaaattatgaaaggtcttgagggaagcgacacagaatttcaaaagaacataatgaatgcactttgggaggccgaggcaggcagatcacttgcggtcaggagttccagaccagcctggccaacacggtgaaaccccatctctaccaaaaaatacaaacatcagccggatgtggtggtgcatgcctgtagtcccagctactcaggaggctgaggtgggagaattgcttgaacctggaaggcggaggctgtagtgagctatgattgcgccactgccctccagcctggacaacagagcaagactctctctcaaacaaaacaaaacaaaacaaaacaaaacaacaatgaatggagaggagaaaagctgcagtggctacggaggccctgatgccatggatggtaaactggtatcttctgacgatgatgactttattgtaaaaagagaacatacacgagcatcaggaataaggaaagccgtgctgagtggcccaggtcagtctgctgagaatgaaaccgaccaggtcaattttagagagatccctccacgatgctatccaaagcatgcgtcaggccatcagcagtggtggtgactcatgcctgtgatcctaccactttgggaggccaaggctggaggatcatttgaggccaggagtttgagaccagcctgggcaacatagtgagacccccgtctctgcaaaaaaaaaaaaaaaaaaaaattagcctggcatggtggtgcacacctgtagttccagctacccgggaggctgaggcaggaagactgcttgagcccaggagttggaagctgaagtgagctatgattgcaccgctgcactccagcctgggcaacagagcaagaccctgtctttaaaaaaacacaatagaaaggcatgcatatattttacttacaaggttcactactctaacagctccactgagattcctgaattcctcactgcattggaagtgctgatggcttcagacttcctagatatatatatttttcttttttttctttttttttgagacggagtctcactctgtctcccaggctggagtgcagtggcgcaatctcagctcactgcaaactctgcgtcctgggttcaagccattctcctgcctcaacctcccgagtagctgggattacaggcgcccgccaccatgcccggctaatttttttttgtatttttagtagagacagggtttcaccgtgttagccaggatggtctcgatctcctgacctcatgatctgcccacctcggcctcccaaagtgctgggattacaggcgtgagccacggcacccagccctagattgttaaataaattataataaactgttaactaatttaggtatttaatacttgtagtttagttagtaatttttcatatattgcatgttcctgtaaacaaatgaactataaactgcgttgcaaagcagattatcttctgttttttccttgcatagtaatcagaattgaaatttgtttgtgacgacaataaattaaggatattttcacaaactgagaaataaacatatataccaactttttttttttttttggatggtgtttccctcttgtcacccaggctggagtacaaaggcgtgatctcggctcactgcaacctttgcttcctgattcaagcgattctcctgcctcagcctcccgagcagctgggattacaggtgtccgccaccacgcctggctaatttttgtatttttagtagagacggggtttcaccatgttggccaggctggtctcgaactcctgaactcaggtgatctgcccgcctcggcctcccaaagcgctgggattacaggcgggagacactgcgcccggccataagctcaattttagacacatacgatatccaatgggggatggacacacacctgacacggtcccagtggagccctgaatggacctctgtgctggaggctgggtgtcgtccctcccccagctgccctgtctcattggccaaagggtttagggagaacaacctagaggccttgctcatccagtggcctaaagttctgcattctaaatacacaccatcgcaggaactcacacctctcctttctccttcctgcctccctcccttcttctttctctctccctctccttccttccttcctccttccctccctccctctttctctttctttcttctctctccctctccttcctgccttccttccttcctccctccctccttctctctctctttccttccttttttctttcttctttctttctctttctctctggctctccctccctccctccctcccttccttccctcctccctccctctctctctctctctgtttctttctcaatttctttcttttcttttctccttccttccttccgtctctctctctctttctttctttttcttctctgagaaggggtcttactctgttgcccaggctagagtacagtagtgtgatcccacctcactgaaaacttgaactcctgggcctaagccgttctcctgccccagcctcccaagtagctgggaccacaggcacacaccaccatgcccccctaattttttaattttttgtagagatgggggtctcactatgttgtccaggctggttttgatctcctggcctccggtgatcctcctgcctcagcctcccaaagtgctgggattacagacggagcctccacactcggcctgtgctctaagactgattcttgccgggacccttagcccgacggcgtgcccagcctgtgcagagggtgggtgcgtgggcccctgctcgggggtgggtgggctgaatccaggtgtcctgggctgtaaagccaagaagcagacagcaggcctggggtggttggagattttgcggggaccctgggggcgctgaggctggagcatcccgagaagtccaaacctgcctggcctgtctctgccgagcagacagcgaggcccgccgggcagcgggacagactggcttccctcctcccggggagacctgccggagcaaacccagctccttttttaggtctgtgatgccacggccactcttggaggtgttttccagctgcacaggaagccgtgacagcgagacccagagaggctggcggtggctctgaattccaagcatagttctcatagttgggaaagtgccactcccggctcgataaaccgaccaggagccgccgccgccagggccatcttctcaccagcagggagagagcatgcagccggtggaggcttctgagagctggccggggcggcctgcgtaaaaggacaggaatgtcaagaatgcacccggcctggcagagacagggactttaccgagcggctcctgggcctggcggccagagaggcgagggagcgggagctaccgagggttcctccatcggcagggaaggtcctgagtcccccagaccctgttaaaagaggctgatcaggttgggtgcggtggctcgtgcctgtaatcccagcactttgggaggctgagtcaggagaattgcttgaggccaggagttcaaagccagcctggggcaacacagtgagaccctgtctctaaaataaaaaaataaaaataaatgttcttggggaagcgaagccgaatttcaggagaacataatgagggtgcagtgagctgggatggcaccactgcactccagcctgggcaatacagcgagaccctgcctctaagtaaaaaaatcaaggccgggggcagtggctcacgcctgtaatcccagcaggttgggaggccgaggtgggtggatcacgaggtcaggagttcgagaccagcctggccaagatggtgaaaccccgtctctactaaaaatacaaaaaacaaaaaaattagcctggcatggtggtgggcacctgtaatcccagctactcaggaggctgaggcaggagaatcgcttgaacctgggaggcggaggttgcagtgagccgagatcacgccactgcactctagcctgggcgacacagcaagactccatcaaaaaaaaaaaaaaaaattaaaaggtaagctgggtgtggtcgcacaagcctgtagtctcagctactccgggaggctgaggcgggaggatggcttgaggccaggagtttgaggttgcagtgagctagggtttcaccattgcactccagactgggggacaaagtgagactctgtctcaagaaaataaaaataaaataagaaaggctgatcagggccgagggctgagatgggaagaaatggtgcttctgtacccagtgctgctgggcctcctgtctggggctggctgcagggcggcccttccaaagagctccctgtggcaggtgcacagtcgggccttggctaggctcatgggaggcagcgctgtgtgttctttttttttttttttttttttttttgagatggagtcttgctctgtcacccaggctggagtgcaatggcgtgatctcggctcaccgcaacctccgcctcccaggttcaagtgattctcctgcctcagcctcccgagtaactgcgattacaggcgctcacaaccacatccagctaacttttgtattttttagtcgagacggggtttcaccatgttgcccaggctggtcttgaactcctggcctcaagcaatccacccaccgcggcctcccaaagtgctgggattacaggtgcgagtcaccgcgcctggcctggggtgggttttttcatttgtgcactgaatgtttattactgacagccagcaaggaaagggggactgcgccctacgactgcaaggaagtgaattcaggaagaacctgaatgagctggggacgacaactggaagcttcgcgtcagacagcaggcggctcacgtttcagtttcagcctgggagaccctgggcagaggacgtcattgcaccatgacctccagaactgtaagctcaggcaggcgtgttgctctaagccaccacatatgcagtagtttcttatgcagtgtaaggagctgatacgcaaggccaggatgggactggttggggtctccaggctggagggccccccggtgagcaggcatggggtcccacagcccaggacagcttcagctcttatttgccatctgctgctgctaggtgttagacgctggactgagcatgctgcacacatcatctctgctgttttccttttttttttttttttttggtggtttttgttttgttttgttttgtttttgaggcagagtctcgctctgtcacccaggctggagtgcaatgacgccatctcggctccctgcaacctccgcctcccaggttcaagtgattctcctgcctcagtctcccgagtagctgggattacaggcatccaccaccacaccaggcttattttttatttttatttttttgtagagacagggtttcaccatgttggccaggctggtctcaaactcctgatctcaagtgatccacctgccttggcctcccaaagtcctgggattccatgtatgagacgccgtgcctggcctcctttttttttttttttttgacacagggtcttgctctgtcacccaggctggagtgcagtggtgcaatcacagctcactgcagccttgacctcctggcctccagagatcctcccacctcagccttctgagtagctgggactacaggtgtgcaccaccatgcccggctaatttttaatattttttcttttagagctggggcctcaccgtattgctcaggccagtctcaaactcctgggctcaagcaatccctctgcttcggcctcccaaagtgctaggatcccgggcatgaacccccgctcccggcctgcaatttttcttttcacagccctgagatgagggtgcagcattaaaacccgtgcagagggtggctgcttctccatgagccgagcaaaccgtcctcccatggctgcttcctgtaaaccggctcctaaggccagcgggcgtttgctctcctgacggcacaggaagtcaggctcagcgaattccagctcagagcgggctctggcggcttccaggcagctccacaatgaggcggctgcgcttttccagtctgctcatcaaagcagagccagccttgtgtggcgcggcgtgccggggtgagtcagccccgggggaaggtggccttgaaggcgggaggggcggccggcctgcagcagcaacgtgagaacagaagcaaccttcatctggctctaaaacttccagaaccagtagctttatagctcgcagagctcctggactctttcctcctgggggtctggcaatcccccacctctcacccctccaaacctctgcctgcctcgaaaaaggaaagaaaaataaaccccaagcaacaaaaccagcaaccagatttggcaggaggggagacaatgcttggagtggaaacgtcagcccttccccgtggagggatgactgcttctgagaacacagtgttcagagacaagagagacagggtgttatgtttagagaggaaaagatccaaacccaaacaaaatggaacagtagtttgggagagaagagaaggctccgaggcactgtgaggaacaagtcgccttcgtacagtggctggggcagctgggtttgcagagagctgtgtccctgggcacctgcgtcaatgtgcacatctgcacgcctgctgtgggcacgagggcctcagccatgagcacccccgggagccatgaggacctcagtgcatctcacagaagcccctgaggacagtgtgcagtggcgcgatctcggctcactgcaacctccgcctcccgggttcaggagattctcctgcctcagcctcctgagtagctggggttataggcgccccccacccccaccacgcccagctaatttttgcatttttagtagagatggggtttcaccatgttggccaggttggtctcaaactcctgacctcaggtgatctgcccaccttggcctctcaaagtgctgggattttaggcatgagccaccgtgctgggccaacagtggctcttaattgggggggtgggtgattcagccccgccaggaaaccctgggcgatgcctgagacatctgtggttgtcggggttgggggagctcctggcatggagtgggtggaggccaggggcgctgctcagcaaccgtaagtgcccagcacagcctcaccccagagaaggatcttaccccactgtccacagtgctgagggagaagaccctgagttaattatttggggaaaatggggttcaatccctacccacactagaataagctcccaacgggatggatggtgtgaaccagggggacccccaactcctgggattcacctcctctctccctcccagctcggtgtggatttcattgtgtgcagcctcctgggacctcagcacagcagaggatcatgggacgcagagtctcttgggggtccgtggaatcccctatccctgggggtttcacctagaggtaattccgtcccccaggggaccctgggcgctgtctggcgacatctgtggttgtcgtaactggggggtgctcctggcatggagtgggtggaggccagggatactgctcagcaccctgcagtgcccaggacaggcccacctcagagaacaatctggccgccatgtctacagtgcctaggggaccctggtttagactctgcagaaaggtgcacacataggccgggcacggtggcttatgcctgtatttccagcactttgggagaccgaggcgggcggatcacttgacgtcaggggttcgagaccagcctggtcaacatagtgaaaccccatctctactaaaaaaaaaatcaaaattagctgggcatggtagcgcatgcctgtaatcccagctactcaggaggctgaggcaggagaattgcctgaacctgggaggcagaggttgcagtgagccaagattgcgccactatactccagcctaagcaacaagagcgaaactgtcttaaaaaaaaaaaaaaaaaaaaaaggccaggtgcagtggctcatgcctgtaataccagcactttgggaggctgaggtgggtggatcacctgagatcaggagtttgagaccagcctggccaacacggtgaaaccccctctctactaaaaatacaaaaaaattagccgtgagtggtggtgggcacctgtaatgccactactcaggagtctgaggcaggagaattgcttgaacccgggaggtaaaggttgcggtgagccaaaatcgcgccactgcactccagcctgggcaacggagcgagactctgcctcaaaaacaaaacaaaacaaaacaaaacaaacaaacgaaaaagaaaggtgcacacagcttccagagcggacacagggcatcagggtgagaaggcacagggcaacgatcaggcgttgatgtgtcccctggcagctgggatgcaggccccccacggcctgccatgttctcaccaggacgccaaagaggggacccacgcagagcccggggagcccgactgaaatggaaacttcaatacaagagacaggtctgagactggccacacctgctgcccgctccacagaaccccagggccccctcagcaaccagggtctgcatgcagagaccctgcacccagcgtgggcacccaccctgcacctgcagcctctccagggccaggtcgcccagcagggcctgggagggcggctgtgtgtggggccttccgtgccagctctgaccgttggtggctctgtgacctcaaggcagggccgtggggcccagggctgcgggcgggagggcctctgccacatggaagggagggccgcactggctggaaaatagtgccttgtgactgtccctgtcagtgtgggccctttgctctcaggctaaatcggtccccggggcagctatatttagaaggggctaaagagagggaatgaatgaggtgcccacgagaaagtgaaaaatagaccagcggggcaggtcccgccgctgccttcagccggagcttggagcctaagaatgagccggcttgttcagacaaagaggccgcgacgacagagggtgacgcgccgccagtgtgggtttggtcgccgcggtgacgggagcaggagaaaagaaaagctgctctctgtccacccggcggtggggtcggcgggggcgggggatgaccacggtcatgtgagagtttgcaagcccgggaaccggggccgggccaggacactgaaccccgtggctcctgtcactccagttctgggcttcccggctgaggaaatgctgtcaccctggccccgggccagggcaaggggcagcgccggcctcgtgacggtggtgctcgggagctgaagggcaggagggttaggaagagaacagagggcagtaccgggccttcccacctcagcacaggtgggtctttctccacgcatgccccccccccagaaaactcctacacatcctgcaaagccccaccgatgtcatcccctctgagaagcccctgattgcaaccatctatgcacagccaggctgcactaaaaccccttctccgcacactggcagctccctggacgttcgttgtgtcctgtgacattgtggctgctgcacacgacccatgtttctcatctcacagctctgggctcagagtccaacatgggcctcactggtttaaaatcaaggcacaggcagggctggtccctcctggaggctccaggggagaatctctttcccgcctttcgcctagaggtgcccgtatccctcggctcgggacccttcctcccccttcacagacacagcacagcctcttcagtctctctctgactctcaccctcctgcctcctctcgtgaggatcctgtgaggtcactgcgcccccccaccccggatcatccacggtggtgctctcatgactcaggtggtccttcactcaatcccacctgcagagtccctttttccatgtgtggtgacacagccacagctcccagggattaggacatggatgtctttgaggcctttgttctgccaaccccagcacatcccagacactgggtaccaaagatgccacttggatggaaggggctggaggccatggtgcagggagttcacaaagggtgttacttcctggaacccactctgttcccagggccgatctccttcccaggacagaggctcccaggcccaggcagccctcggatgtgaagtgcctgccccacctccatccatagcaggtgctgctgctgtgcatgggcacacgtggcctggtaggcccacccctctgggctctgcagcaggggccggcccgtccgggcacacacatggccaaggatggacctcgagcctggggttctctgctgtggcccgtgggctccaggtcacatcatcagaatggctagaggtcaccagtatcatgtgtgacatctccagggccaccccactccagccctggtgttgttagaaagtcccggaaaactacaggcccagggagcttctccctgagggctagggatcattacggatgttttcatgttaacaatggaaaacaaaaatcaaaaaacaaaaaccaggtatggtggctcacgcctgtaatcccagcactttgggaggccgaggagggcggattgcctgagctcaggagttcgagaccagcctgggcaacgtggtgaaacctggtctctactaaaatacaaaagaaatttgctgggtgtggtggcgggcgcctgtaatcccagctactcgggaggctaaggcaggagaatgccgtgaactcgggaggcggaggttgcagtgggttgagatcgcgccattgcactccagcccgggcgacagagcgaggctctgtctggaaaaaaaaaaaaaaaaaaaaaacctagccaggcccagtggctcacacctgtaatcccagcactttgggtggctgaggtgtgtggctcacttgaggtcaggagttcgataccagcctggccaacgtggtgaaaccccatctctactaaaaatacaaaaattagccgggcctggtggcgctcgtctgaaattccagctactcgggaggctgaggcagaagaatcgcttgaacccacgtggcggaggtcgcagtgagccaagatcgtgccactacactccagcctgggtgcagagcgagactctgtctcaaaaaacaaaacacaacaaaacaaacaaacaaacagcgacaaccccctctcaagaataatctgaccctaatgtcagagatgctgatacccagagaccctggtcgaagggatgttccagccaggagcggctttctcgtgaactgtgcatgttgtttgcatcccgacaggttcaagtgacaaagctgggcaggctgaggccaccaaagggtttcctgggtccctgttcctgccacacaccttgaatcctcaatgccaaggcaactgcaaacccgagggaccccaggggggacactaggtctggacatgaaggtttggcagcaaactgtcaggacccccggagagaaccctgactcctgtgccaacccaactgtgtctggctcaacgctcgacgctcaaacacagcaaacggcaagaaggcaagtccaggatatacgttttggcaaaaatggcagccgtgggggtggaggtggaggaggacatgcacggagggcttaaacagggctgtgtttttttttttttcttttagatggagtctcactctgtcacccaggttggagtgcagtggcggatctcggctcactgcaaactccaccccctgggttcaagcaattctctgcctcagcctcctgagtagctgagattacaggcgcccgccaccgcacccggctaatttttgtatttttagtagagacggggtttcactatcttggccaggctggtcttgaactcctgaccttgtgatccacgtgtctcggcctcccaaagtgctgggatgacagacgtgagccaccgcactggccggggctgtgttttcatctggaggtttgcacggggccggggcattgtaaggctaagcatgggaatttcagtctctcccccagaaccttctggagagacaccactgcagctaccaccgctgcagctaccaggcaccagctgaccaggagggaggaaacacaaggctgctgtgtctggggtcagccagcaggccgggggtgagggcgggggtgacaggggagccagcacacttgttgtgcacaaagttccttgtgacagtgagttcgtcttggcctctgtcccaagatgaggttttgatgacacgcatggaatttctaacaatgaaatggagtgtgtggttttgctcacgcttacatccccttttcttgtctatccaaattccattacgccttttcttgctaatgcagaaacacggccaaatcctgggctgccccaggaagtgccgaggcctctttccgctctcagtggaaaagggaaatgtggctgccttgggtctggggtgccctgattctcagaatccctgtgggatggggaaagagtgtttgggttgagactggctcacaggaagtgggtagaatgcagcagaaggagcggctgggaggcactctctcatccagcccccgtggcgaccctccttgctggcttattttgagacggagtcttgctctgtcgccgaggctggagtgcagtggcgcaatctcggctcactgcaacctccgcctcccgggttcaagcgattctcctgcctcagcctcctgagtagctggtagctgggattacaggcatccaacaccaagcccggctaatttttttattttttggtagagtcgcggtttcaccatgttgttcaggctggccttgaactcctgacctcaagtgatctccgcccacctcagcctcccaaagtgctgcgattacaggcaggagccaccgctcccggccacctctgctcacctcctcaccaagccccagcttctgtgactgtcccccagggagagtgaccatggccctgctgggctctgaggggcttgtgcagatgagcaggtggcctacacagcctgagggaccaccagctgctctgtggcaagtctcgtgactccaatcccgctctgcctctggccagcccccgggccttgccacatcttttggttgccgagcctcagtttccccacctataaaatggggacaatgagccctgctccccagggatcctaggagaactaaaggaattggagcagtggacctggcctgcagggggcacgggagaggtatctgctgagtcgctgagtagggggagctgaggatcagggaggcgtcagtggtggggatggcccggctgctgggaacagggccaggggacttagccagggcccgacgagagctgcctgatgtcattgctggagcctcttgtcatccctcccagcagatgctgcagcatagggacctaatccccacggcacgtggccacatggctggcagcttgagcttgcggcctggagacacctgagccttgcccaggcagctccgtgccacctgccgtccagccacgctgccatcagccagcacttgtgtgtcccagaggacggggctcagggcaggctccagggacctcaccctggccgtttgacctccagcaaaggaggtctggtctcccggtcagaaaacaggagagagggcagggacttctccatggagaatatattcatggagaaggacgtaaaaggatccagaccagacaccacgggcacatgcgacccctcggccatcggccaggttttaaatcatcactgtcttcgtcgtcatcctgagtgtcatttgtgtgggggccgggactagggtgaggccatgcggcactcaccttgggggcaaaatctagggaacgccaaaaagccctgccgtgctggtaaattatattttcatacaatcttttattatttatataaaaatatatttatatgtatttattaatatatatttatctattatctataatatataaatatgcatttataaatatataaacaaatatatatttataaatatataaaaacacatatacatatttataaataaaatatatatttaaaaaatatatatatatacacacacatattttgagacagagtctcgctctggcccccaggctggagtgcaacggcacgatctcagctcactgcaacctctgcctcccgggctcaagtgagttttctgcctcagcctcccaagtagctgggattacaggcatgcgtcaccacgcccggctaattttttttattttcagtagagatggggttttgccatgttggccagtctggtctcgagcttctgacctcaggcgatccacccaccttgacctcccaaagtgctgggattacaggcgtgagccacggcgcctgactgcttgtgtgttcacagctgccccccaacgcttgcattcccgcctgagctccgcctcctgtcccatcagcagtggcatcagattctcatagaagcgtgaacccaattgtgaactgtgcatgtaagggatcttggttgcacgctccttatgagaatctaatgcctaatggcctcgactggccaacatgataaaaccccatctctactaaaaaatacaaaaaatcagccggaaattgcttgaacccaggaggcggagtttgcagtaagctaagatcatgccactgcactccagactgggcaacagagagagactctgtctcaaaacaagcaaacagaaataatctaatgcctgatgatctgtcactgtctcccatcacctccagatgggaccatctagtttttatttgtttgtttgttattgagacagagtctcgctctgttgccgaggctggagtacaatggtgcgatctcggctcactacaacctccgcctcccgggttcaagcgattctcctacctcagcctcccaagtagctgggactacaggtgcccaccaccacgcctggctaatttttgtatttttagtagagatgaggtttcatcttgttggtcaggctagtctcgaactcctgacctcaagtgatccacccgcctcagcctcccaaaatgctggggttataggcgtgagccaccacacccagcccagggaccatctagttgcaggaaacaagctccgggctcccagtgatcccacattatggtgagttgtggaattattttattatatattacaatgtcataataacagaaacaaagtgcacaaaaaaagtaatgcgtttgaatcgtccccaaaccatcctcccggctccaccccccccacctccccactgtctgtggaaaaactgtcttccacgaatccactccctggggccaaaaaggttgaggactgctgccttaaggaaccagaaaaggaagaacgaaggcagccccaagccagcaggaggaaggaaattgtaaagatcagagcagcgataaacgagacagagatgagaaaaactggcgagtcgacgaaaccaaaagttggttctttgaaaagagctaggtgattgacaaacctctagcggggctgaccaaaagcaaaaccaaaaaaaaaaaaaaaaagaggaaataagatgcagataactacacgcagaaacgaaaggaggacattactaccaactgtatggaaataaaaggcattatcagagaacacggtagcattatgaaccagtgtgtgacatccaattaggtaatctacacgaaatggacaaattcctagaaaaacgcgaatgaaacagatcagcgatggtttcaggttcagctcacatctcttagatactgacatgccagcatggtgctgagcatatatatatatacatatatatatgtaatatacattttatatgcaatatatatgttatatattatatgcaatatattatgttatatattatatactatatattatattttatatgtacatctcattacatatatgtacacattacatgtaacatcacattacatatatgtaatatcacatgtaataaatcatatcacatacacgcacatattacatgcaatatatcatactacatacatgcacacgttacatgtaatatgttatattacatacatgcacacgttacatgtaatatgttatattacacacatgtgcacattacatataatatattacatatatgtacatattacatgcaatatattacatatatgcacatattgcatgtaatgttatatcacacacatgtacgtatcatgtgtaatatatcacatacatgtacatattatatgtaatattgcatacatgtacatattatatgtaacattgcatacatgtacatattctatgtaatattacatacatgtgcatattgcatgtaatatattgtatgtaatatattatatgtaatatatattacacatatgtatatattatatgtaatatatattacacatatgtatatattatatgtatatatgtatacacagtggcgtgcacctatagtcccagctactcaggaggctgaggcaaagggattgcttgaacccaggagttcaagattgcagtgagctatgatataatagtatattatagcagtgaactataatatattatatataatatataatatatatatttttttcttttctttagagacctggtctcactctgttgcccagcgtggagtcccatggtgcaatcacaatcacagctcacagtagcctccacctcctgggctcaagtgatccttctgcctcagcctcccaaaatgctaggatgacaggcacgtgccaccacactgggtatattttttaagagaccgggtctcactctgtcacctaggctggagtacagtggtgcaatcatagctcactgcaaccccgaactcctgggttcaagcaatcctcttgcctcagcctcctgagtagctgggactacaggcgcacgccactgtgtatacatatatataggtatatgtgtgtataaaatatatatgctatatatatatatatatttttttttttttgagacagagtctcactctgttgcccaggctggtgtacggtggcatgatcttagctcactgcaacctccatctcccaggttcaagcgattctcctgcctcagcttccagagtagctgggattacaggcacctgccaccatgccctgctaatttttgtacttttggtagagacggggtttcgctgtgttggtcagcctggtctcaaacacctgacctcaggtgacccacctgcctcagcctcccaaagtgctgggattacaggcgtgagccactgcacctggctatttttatatttttgtatctatatgcttgtttaatctttgcaaccttcctgcaaaacggagaacgtcatctccactgcagacagttgacgcgaacccacccaaacggggcagagctggtaaaaggggatctgggatttgaactcaggtttcctggctctgagcccggagcccttttatgggatgactcaacctcccaaagtgtcaggcacacataaaagactggggcttgtttgttcctttttctaaaaaacaagagattccaacctcatgaagtaagagaaaatgccacataccttttttagttttcccaggaatcacagcttgctgtacaccctgtttaaaaaaggagagagaaagagaaaagcatggttacatattttttacttacaaggaactcacagagctacctccagcttttatcggagaacgacgttgctgtccccaaaaatgaggcatgggaattcgaaagggccgtgccctccggagaaaacgggggcagaatccactttattctttaccaccgatccgtgcggagaagacctggatgcttctcttgctggacaacagggcaaattatcttccagaaacttgtgttattccatttcagaacaaggaagccccaaccccacagtcaaagtccagtccatcagacacaccagtgcaagaaaaacaaaatacccaggcacggcgccttcccatggaatacttcggtgtttttccatctctgatttctacttttatgtaagccacgtgccgggcaaagggagaggtggaaagtggaaactggggacaaaccaattaaccccgaatggaggaagtgacaggtatacggggggcaggaaggccgggggtctcatgtgagccgcccagggccaggaggtcaataggaaggaaagaacgtctccaggccccggtgattggtctccgggggtcggggcggttggggcctttggagctgcggttttccatggaacggaatcctctgttccaagccggaccctgcacagggccaggccccgtatccgtctccaatgcacagtgcacggatcgcgagggggggcccacggccgtctccaatgcacagtgcacggatcgcgaggggggcccacggggaccaccttccgtggtctttcctgactcccactaaggtctggagggagatccaggcagcgatctgccccctccagcttcgcggcagcctcctatttcgtggacaaggaggcccgaggcaggcaaaggcccctgccttgcggagcgtctacaccggccgaggtcatggggccgggacttgcgcacaatgaacccagatgccaggttctgtgtctcccggttaggccaccactgctctgctgctgagccggcagccccacttggagaagccaggagctgcaccactgtcagctctaggggaggccccgtcctgcctagcggggctcaccctgcagtgggcttgcccggcgaggtcagcagacgcccctgcaccgggcccaacccaggcccagcttcctgagctgctcgaggccgggctgggccgggttcacgtggccaaggctgtttccctcctgccctgaagggcccctgtggtctctgaagccggccaggcccctcttccgtcacaaacatttgctatttccacaaaccaatgggtttttttccaccgacacaaagaagagccacatggctgctgctcctgggctggagtccgggccacccacacacgacactttctcagcagccctgcgccccggggctgcattggaggccaaggaagctgaggtcggcgggaagcctcctcaccttgcagcccagctggggaggccgagtcccggctttcccagaggctcccgggtctcagctgcaggaaggcggtgactgaggtcaccttctcctaagccagggtctctcctcccacccagcaatacggacaccagcgccggattgttctccggggcgggagcatcctgggctctgcagggtggtgagctgcgtccctggcatccacctgctccgtgccaggagcaccccccagatgtgttggccacaaatgtccccagacactgccccgggtcccctggggggcagaatcactccgtgtgagatccctaacctcttagtgacctagagacatccaggggggctgcctcccctcccacctctacacacacacacgcacacacagacacacgcacactcacacacatatgcacgcacacagacacacgcacacacgtgcacacaggaatactcagacacacgcacacacgtacacacgtgtactgcacactcacgcacatgcacacaaagacacgcgcacacacgtacacacaagacacgtgcacacacatttgcatgcacacacagacacacatgcacacacagacgcacatgtgcacacacacgtgcacacacatttgcacacacagacacgtgcacacacagaggtgcacatacacgcacagacacacatgtgcacacagacacacacatgtgcacacacacagacacacacacacgtgcacgcacacatgcacgcaggagcgagcgcctccacccagccctgcatctgaagcaaggtcctgctagtaaacatgcacagactcaagaaacgaggggctgcaggacttttcctcctcctgcccaaaggcacctgcactcacaaaagactcagaggctccgcctggccgggtcagcgaatggagttgtagcaccgtttcaggaccgtgatagagaaagacgggaagttagacttctgacccatcacaaactctgagtcaaagtgcgatgtgcccaggccagcccggtgtgacctcagctcctgatccataaaatcaggacagtgaccgaggatgctggggccacctcacctgcagccccgggtcagcctcagaacccacaggactttgaccctgccccaggccatggtccttgaccagggaaccacagctccttattctgatggggtgactcggtgcatttctctctcaggcttactttttttctctttgagacagagtctcactctgtcgcccaggctggactgcagtagtgcgatctcggctcactgcaacctctgcctcctgggtacaagcgactctcctgcctcagcctctcaagtagctgggactacaggcacgggccaccaggcctgggtaattttttgtgtttttagtagagagggggtttcaccgtgttagccaggatggccttgatctcctgacctcgtgatccgcccacctcggcctccgaaagtgctgggattacaggcgtgagccaccgcgcccggcctctcaggcttacttttaggtggctggaaatactgcttttcatgtgcacactgtattattttcatcatccttgccacagatgggcaccgtgtttttttgtttttgtttttgttttttttttgagatagggtctgttacccaggctggagtgcaatggcgtgatcacagctcactgcagcctcaacctcctgggctcaagcgatcctccctcctcagcctcctgagtagctgagactacagccacatgccaccacacccagctaatttttattcctgtagagatggggttttgccatgttgcccaggctggtctcaaactcctgggcccaagcgatcctcccaccttggcctcctaaagtgctggatgacaggtgtgtgccactgcacccggccagcaaaaatgggtttaaaggcagatgatcaaaccatgttgtagaacctcaatttttaaaaataagagagtgtgtgtagatgtctggggaaaggataaagtgctgggattgtggatgattttcctctccttatgtgattctcagattctgtaaaatgaagttatataactttctttcctcttctttctttctttctcttttctttcttccttcctttccttctctttctttcttttttctttctttcttctctctctttcctttttatttatttattattttttttgggacaggtgtcattttgtcacccaggatggagtgcaatggcgcgatctctgctcactgcaacctctgcctcctgggctcaagcaattctcctgcctcagactcccaagtagctggcattacaggcatgcaccaccactcttggctaatttttgtattttcagtagagacggggtttcaccaacatggccaggctggtctcaaactcctgacctcatgtgatccacccaccttggcccccccaaagtgctgggattataagcgtgagccatcgcgcccagccagttatattcctttcatagtcacaaagaatatatatatatacacacacacacatatatatacatatacatatatatccacagttgattagattctcattatttgtggtagttctgttctgtgaagtcaccacaaaaactgagtttgcgaacacaaatcattactcctagagaacatttttgtaggggtagtttcctttgagtttcaggaaactttcctttatctgatcaatacatgacctgttctgtgtgtctttttttttttttttttggagacagggtctcgctctgttgcccaggctggagtgcaatggtgcaatctcagctcactgcagcctcagtctcctgggctcaagtgattctactgccttggcctccagagtagctgggattacaggcacccaccaccatgtccggctaatttttttttctctcaagatggagtttggctcttgttgcccaggctggagtacaatggtggatgtcggctcactgcaacctccgcctcctgggttcaagcgattctcctgcctcagcctcccgagtagctgggattacaggcatgcaccgccatgcccagctaattttgcatttttagtagagacagggtttctccatgttggtcagactggtctcgatctcttgacctcgtgatccgcctgcctcagcctcccaaagtgctgggattacaggcgtgagccaccgtgcctggctcaaaggtgtcttcttgaatgcctatcgatgatgtgagtgttgaatagggcagctgctctctcagtcctgcctgagcaaagcttttctcacctaccagttcctccacgaggccctgagggacacgagaaggggcctcagcacgatgcctggggccactgcaaacagcaaaatcaccaaaaagagcacaaaaacgcaaaccccgaggctctcgctagacagtaatgagggcgtggtccacctaggaggggaaacggggaggcggagcgtggcctgggctcagggaacgcacgtccatgactctaatttcttgtctctctctgcgtgtccaaggataagagggaaagtaccccaggcattgatttggggttcacaaatacacaccaagccggcgaattcgcaaatacggactccgtgaatgacaaaggggactacagtacaaacccagcctgtccctcgcgcccctagtgtgctgagggcctggccgtggcaggaaggaagggaccgcctcagaccccacatcaccccatcccccaggtctgtctcccaccggcccccagggtcgattctcaggagaggaggtccgacctgctttagggggcccaagcaggaccccttacctccacatcttatttctgtgtcccacccagcccttcccttgaggcagtgattctcacctgggagtggccctgctcccaggggaccctgggcggtggctggggacattgtggttatccagacttgggggtgctcctggcatggggtaggcggacgctgcggtgcccaggacggccctgctccagagaaggatccagccccgatgtccacagggcctggggggaccctgaattcattatttggaaaaaagctgggcgcggtggctcacgcctgtcatcccagcactttgggaggccgaggtgggtggatcacttgatgtcaggagttcgagaccagcctgaccaacatgggtagaccccgtctctactaaaaatacaaaaattagccaggcgtggtggtgggtgcctgtaatcccaggtactcaggaggctgaggcaggagaactgcctgaacctgggaggcggatgttgcagtgagccgagatcgtaccattgcactccagcctgggcgacagaaggagactgtttcaaaaaaaaaaaaaaaaaaattatttgggaaaacagttgaatgcaatttctgctcacagtaggcatcagaataagctcccgatggggcagacggtgtgtaaaccagagggatcccagctcctgggactcacctcctctctccctcccccattcaaggtgtggattgcaatgtgtgcagcctcctgggacctcagcagggcagaggatcatgggacgcagagtctcttgggggtccgtggaatcccataacccaggggggctcaaccaggatgattctgctcccaggggatgctgggccatgtctggggacatctgtggctgtcacgactgggggtgctcctggaatggagtgggtggaggccagggacgctgttcagcaccctgcagtgcccaggttggcccaaccccagagaatgacccaggccccaatatccacggtgccctggggagaccctggttaggtcctgtcacagttttggtgtcagcaccactgcccttctgtgcccaggaggggccctgtcctccccttgtcccttcctctctgcaccctggcctgggtctttgaccctcccagctcttagcactcttggacacacaatccccacaagagcctctctcagaaagatagaaatgacactggttggccgggcgcagtggctcattcctgtaatcccagcactttgggaggccgaggcgggtggatcacctgaagtaggagttcaagaccagtctgcccaacatggtgaaactccgtctctactaaaaaaaaaaaaaaaaattagctgggcatagcggcaggcgcctgtgatcccagctactcgggaggctgaggcaggagaatcgcttgaacctgggaggcagaggttgcagtgagccgagattgcaccattgcactccagcctgggtgacaagagcaaaactctgtctaaaaaaaaagaaatgacactggcttctttctcttctttgcactctgaaaagcacctgagagcaaagtgcccagcagaggcagctgccccggggcgacccgagaaacaggaaaccctgtttctgagcttcgcaggctcttctgggagaccagcgggtaatccccttcctccgacatttctctgagaagtctctctgcgttctgcttctcagaaagaaaccagggtccggggcaggcattcacgccctccacccactcaggggtttgcagtaacacccttgggatctgcaggttcacacagagccagagccgtgagtcaccgcagccccggagctgccggggtccccacctgctcagccccaggaacacacatctacagcgggttcctttttcttttctttctttttctttctttttttttttgagacagagtctggctctgtcgcccaggctggagtgcagtggcgcgatctcggctcactgcaacctccgcctcccaggttcaagtgattctcctgcctcagcctcccaaagtgccgggattacaggcgtgagccaccgcgccccgctccttttccttttcttttaaatgattaatactcatgatttctgttcagctgaaagctacactcactttcaatacctacaacagggtttttccccccgggcactgtggacactggggccagatccttctctggggtggggccatcctgggcactgcagggtgctgagcagtgtccctgacctccacacactccatgccagcagcaggtgcccccagacatttactgagtgtaccctggtcaggggggacaggatcgctcccagcgtacactggaatcttaggggattccacagacccccaagagactctgcgtccataatcctctgccctgctgagttcccagaaggctgcacacattgaaatccacactctgagtggggagggagagaggatgtgagtcccaggagctgcagtccctctggtttacaccatcggccccatcgggagtttattctggtgtccagtgtgagcaagggacagattcaatctttttctttttctttttttttgttttttgagacagagtctcgctctgtcgcccaggctggagtgcagtggcgtgatctcggctcactgcaagctcctcctcccgggttcacgccattctcctgcctcagcctcccaagtagctgggactacaggcgcccaccaccacgcccagctaattttttttttgtacttttagtaaagacggggtttcaccgtgttagccaggatggtctcgatctcctgacctcgcgatccacctgcctcagcctcccaaagtgctgggattacaggtgtgagccactgcgtccggcccagtatttttcaaataatgaacacaggtctctcccgttctgtactctggacattgggcctggatcattctctggggtggggccgtcctcggcactgtaggctgctgagcagcgtccctggcctccacccactccatgctgggagcaccccgtagtcgtgactaccagaaatgtccccacattctactcaggatcctaagagaaccactcccaagcattattgaggtcacacttttttttgtttttgttttgagataggtttcatttctgtcgcccaggctggagtgcagtggcacgatcttggctcactgcaacctctgactcccgggttcaagtgattctcctgcctcagcctccctatagtagttggaactacgggtgtgcaccaccacgcctggctaattttggaatttttagtagagatggggtttcgccatgttgcccaggctggtcttgaactcctgacctcaagtgatctgcccacctcggcctcccaaagtgctgggataataggcatgagccaccgcgcccggcccaggtcacacctttgaacacttcagtgggctcattttatgtgtgaatttttagcctaattgtgaactgttgagttatttaaaccttcgcacccaaacttccttggtccagagaggatttgaagctcatacataaacaacacagcagcattgcaaatcaaggaatggaggagacggtgaaggtggtatttgggggtgttgggtggggtgggagaaacagcagggaaaaatcaaaggatggttagccaatgagaatggtgttcgtgtgtgtaagggcaggctcctaaacaggagtgtagctaattttcaactcaagaaaaagaatgtgtattgaatgcagtgggttgaatagtgtcccgcaaaagctcacgtcctcctggaagcttggcacgtaaccttctcagagatggggtctctgcagatggaagatgatacggatcttgggatgaaatcatcatcctgtttgtagggtgggccctaaatccaatgactggtgtccttttaagaaggagagacacaggctgagattggtggctcacacctgtaaacccagaactttgggaggccgaggcgggaggatcgcttgaggccaggagttcgagaccagcctggccaacgtggtgaaaccccatctctaccaaaaatacaaaaattagccaggcatggtggcgtgcacctgtaccactcgggaggcggaggcacgagaattgcttgaacccaagaggcggaggttgcaatgagccaagatggtgccaccgcactccagcctgggtgacagagcaagactctgtctcaaaacagacaaacaaacaccaagaaggagagatttagagatgcagaggagaggacatggctgtgtggagatggaggcagagactggggtgacacggccacaagccagactcctagagcccccagaagctgggagaggccggaaggaccctgcccctggagtctctggagggagcctagccctgcagacaccttgatctcagacttctggcctccaaaagtaggagaggagactgtcacaaaatgtctgttatttaaagccccgcaatctgtaataatttgcatggcactctaggaaatgaatacattggtcatttaaaaaaaaaaaaaagaatcaggccagatgcggtggctcatgcctgcaatcccagcactctgggaggctgaggcaggaggaccacttgagactaggaggttgagaccactctggtcaacacagtgagaccctgtcttgaaatggaatgaaatgaaataaatacaataaaatatccgctaagcttctgtgtctccctgtagccatgacaacagaagaccctgaggtggagaagatgacgccttcctgttggaatcacgggctcagactacatggggaaaacggaaaacacacgtgcaaccctcacacaacgtgtgcaccctgcaggctcaaaaaccaaagctgtgccaggcgcggtggctcacacctgtcatcccagcactttgggaggccgaggcgggtggatcatgaggtcaggagatcgagaccagcctggccaacatggtgaaaccccgtctctactaaaaaaatacaaaaattagctggacgtggtggcacacgcctgtaattccagctactcaggagactgaggcaagagaatcacttgaacccgagaggcggaggttgcagtgagccgagatcgtgccattgcactccagcctgggcaatagagagagactctgtctcaaaaaaaaaaaaacaaaaacaaaagctgtttgcgtcaaaggaagggtcggttagttccttccctccaggactgaatccatgagaactgcagaaatttaggattaggaaccagttcgcccagggttcctaaaacctgcaatcactgggagaggcccatcccacccggaagaacctgattgagtggtctggggtgtgccgggcacagggcagttgagactccaggtgacagttaccggcagctcagggtggaggctgtgtgagcccggccgagtcctacaggaagcgtctgcagagtgtaatgtgctcagcgcttctgcaggggacgggcggaatgatgtgtgcagacattttaaaccatggtagaggccgggcacggtggctcacgcctgttatcccagcacttcgggaggccagggcaggcggatcatctgaggttaggagttcgagaccagcctggccaacatggtgaaaccccgtctctactaaaaatacaaaaattagtcaggcgtggtggtgggcacctgtaatcccagctactcgggaggctgaggcaggagaatcgcttgaacctgggaggcggaggtggcagtgagccaaaatcgcaccactgcactccagcctgggcgacagagccagactccgtctcataaataaataaataaataaatataaaaaataaataaaggggacatttggacacagatgcacacgggagggagaatgctgtatagataggagattggggtgacaaggcagagattgggggtgtcacttccacaagccagggaaggccaaggatctccggccatcaccaggagctgggagtggccctgggatggattctccccactggcttcggaagaacccagccctgcctacaccttggccttggacttccggtctccagagcggagagagaatgaacccgtggtgtctaaacggctaggtctgtggaccttgtacgagcaccccatgaaactcacacaaagccctaaaaggcgtctcagcctggctccgggggaagggtccgagacagcagaccagaactggggccacagcaatggtcgggggacacctccttcccctcccacccccactgctaaaggactggctagaggttgtaaggccagggttggcaacattttcctgtaaaaggccagagagcaaacttctctggctttgtgggtcagatggtctctgttgcaactgctcgactcagccacagaggcaggagaggctgctgtggacgatttctcaatgagtgggcatggtgggtgccaataaaactttatttacaaaaacacactgtcgctgggcatggtggctcaagcctgtaatcccagcactttgggaggccgaggcaggcggatcatctgaggccaggagttcgagaccagcctgaccaacatggtgaaaccccgtgtctactaaaaatacaaaaaaattagccgggcgcggtggcgggcgtctgtaatcccagctactcgagaggctgaggcaggagaatcgcttgaatccgggaggcggagcttgcagtgagccgagatcgcgccactgcagtccacagtccggcctgggcgacagagcgagactccgtctcaaaaaaaaaaacaaaaaaaacaaaaaaaaaacaaaaaaaaaaacacaaaaacaataacaaaaaacccacactgtccatcatgggcccttgctggctgacctctgctctagaatctccttaatttcaagtcattgggttggccgtgatcattcctgtagtgatgcttccagaacacaccttttccatctgcaggtttatttcttctcagttgtcgtcgatttgtgtgtgtgtgtgtgtgtgacatagggtctcactctgtcacccaggctggagtgcccgtggtgcaatcacgctgcctcgacctcccaggctcaagcgacctccctgcctcagcctcctgagcagctgggactacaggtgcacactaccacaccagctaatttttgcatttttttgtatagatggggtttcgccattttgcccaggctggtcttgagctcctgagctcaagcgatcgtcccacctcggcctcccaaagtgctgggattgcaagcgtgagccgctgcactgggccggtgtcctctgtcgtatcctacttaggcactgcctctgacgcttctgtgctccagcggcagagctgagtgctggagccggagactgggccacagagccgaaaacagcaaccctctggccctttacaggaaaagctcgctgccttgtggtctaggatgagacctaaaaggtcacaagtctcctcttcagagcaccagactccgacgggggcagggcaatgtcaactgggcaacagggaagtcacccatctgttcccgggcaccacgcgctcaggcatggaagggagagaagggcgttgccattcagcaggaactcaggaagtagggcgttcacaacgccttcctggaaaatgcatctcaccaggcactccagccacccaaaaacagagacacgggcatgcaagcacacatgcacacacgtgcagatacacacacatatagacatacacacatatacacatgcacacacacacacttacacacatgcacatacacacatatagacatacacacatatacacatgcacacacatacacatacatacacacacatacacacatgcacatacacacacatatagacatacacatacagacatgcacacacgtgcacatacacacatatagacatacacacatatagagacacatatagacttacacacatatacacacgcacacacatacacacgcacacacacatatacacacatatagacatacatacacacacgtgcacatacacacatatagacacacatatacaacacaaacacacacacatatacacatagacatacacacatacatatacatacacacatacatatacatacacacacacatgcacatacacacagacttacgcacatacacagggtctctgtgtgtgcacatacacgtgcacatatacacacatacacatatatatacacacatatacacacatacacatgcacaaatacacacatatatagacatacacacatatatacacatacacacatatatacacatatacacaaatacacatatacacatacacatacacatatatacacatacacacatacataaaatatagacacacatatacacatacagacacatatacatacatacacacatacacacatacacatatacacataaatacacatacacacatatacacgcacatatatacacacacatatacacacaaatatatacacatatgcaaatacacacaaatatacacacaagtacacacacatactcatgtgcacacacatatccacactatacacatatacatacatatacaaatatacaaatacacacaaatatacgcatacagatctgtgcacaaaaacatacacatacacatatttacacacatatacacacaagcagacacatatacacaaaagcacaaacatatacacagaagcgcacacacatacacacaagcatgcaagcacacacacacatacacacaaatgcacacatgcatatacccacaggtgcgcgcacacacacacaactcagtgaagggagaggccccagcatgaggcacctgctggggatcagttccacaaagggtgcagcataactgctggagcaggaacagctacacagtggatggcgatcatctccattctctctctctctctctttcttttttttgtgagacagagtctcgctctgtcgcccaggctggagtgcagtggcgcgatctcggctcactgcaagctccgcctcctgggttgacaccattctcctgcctcagcctcccgagtagctgggactacaggcgcccgccaccacacccggctaattttttgtatttttagtagagacgagggttcaccgggttagccaggatggtctcgatctcctgacctcgggatccacccgcctcggcctcccaaagtgctgggattacaggcgtgagtcaccgcacctggccaatcatctccattcttaaacaaaaagtgtgagacatgacaattatgtcgctatcatactaaatagggtctctcttagcactgtggacactgtagccagaccgttctctggggtggagccatcctgggcactgcagggtgctgagcagcgtccctggcttccactcactccatgccaagagcatccccatcgggacaaccacagatgtccccagacatcacccgtcccccagtcatgacaaccacaaacgtcaccagacatctcccggtgtcccctgggagcaggatcagccccagctgagaaccaccacactagaacaactgcgacaaaaatagccacaaaatcctagaatccagcagcacaggactgagcaatgtcagtgacatggggccaatgtttgtgcctccggatctcacactgaaatgcgaccccctatgttggaggtgaggctgggtgggcggcatttgggttgtggcgggaggggggtccctcatggcttggtgctctcccctcgggaatgagcgagttcccactctgttagttcacggacgacctggttgttaaaaaaagcctggcacctcctccctcctttctctcgctccctctctggccgtatgagatgcccgttcccccttcaccttctgccatgagtggaaacttcctgaggcctcaccagaagcccaggagatgctggcaccatgcttgtatggtctgtagaactgtatggtctgtagaactgtgaaccagataaacttctatgctttataaacccctcagcctcagctctattcctttatagcaacacaaaacagactatgacagtcaggcacggggagacacgcagagcttgactgggcctcaggtcaggaaggaaacttccctttccagccacatgtggatggggcccgtgttcactggggaagtggcatctgcaaacctcagctcttccatctgtaaaatgggcatctccacacccacttagccgagaactcatgagagcaaaggagaagctaaatccctaaggacgcagccccataatgggccccaggaggagcttgagagagacagacagcccaggagccaagtctcagccatgaacagaaggtactggaaggttttccaggagcagacagcgctcctcggacagtggagagatggtaaaggacgtgaacccacaattcacacaaggaaacaaaaccccaagcctaaaaacagatgttcagcttggctttttaattttttgagacagggtcttgctctgtcacccaggctggagtacagtggtgcaatcacagctcactgcagccttgacctcctgagctcaaccgatcctcctgcctcagcctccccagtagctgggattacatgtgcacgccaccacgcctggctaatgtttgtattttttttttttagagatggggtctcactatgttgtccaggtgggtctcaaactcttagactcaagtgatccacccaccttggcctcccaaagtgctgagatgataggcgtgagccaccgtgcccggcggagttgtccagctttaacaaacaacaacacatgcaccaataacaggattccaccctggcctctcggactgtcaccgatggaagcctgacgacgcccagtgtcttctaggatctgcggaatgggggcctctccagcacagataacagagggtccctggtcaacatttttggaagaaaatgtggcggcattgtcggaaccgagaaggtgctacctgctgatgcgacaattccatacctacgaatttattgcaaagaccttgttggacacgtgggcaaagatgtctacctatatccttatccttgttctgattgcagaactgtgaatgcttccaaactggaaccatctcaatctgcctgcagaggcgtggttaggccacgttgcatttctaggatgggtagcgtgcaggggtggcttggagggtgcctgcaggctacgttaagtgaaagagttatcagatgtgtggtcacttttcttttcatttctttcctttttttttttttttttttttttttgagatggagtcttgctctgtcgcccaggctagagtgcagaggtgcggtctcggctcactgcaacctctgcctcccggggttaagtgatcctcctgcctcacccttctgagtagctgggattataggcgagtgccaccacgcctggctaatttttgtattttcagtagagacggggtttcaccatgttggccaggctggtctcgaactcctgacctcaggtgatctgcccaccttggcctcccaaagtgttgggattacaggtgtgagccactgcgcccggccagttgaccgttttatatgagtcatataaaatatgggctacctacctatcctgtcccattggcctatttgtctgttcttttgacaatgccacattgtccctctctctttgtgtttttgttgttttgttttgttttgtttttctttgagatggggtctcactgtgtccaccaggctggagtgcagtggtgtgatcatagctcactgcagcctccacctcccgagctcaagcgatcctcccagctcagcctgccgagtggctgggaccacaggggcacaccacaacaccaggctaattttttgttttttagagacagggtcttgctgtgttgcccaggctggtctttaactcctgggctcaagcaatcctcctgcctcagcttcccacgtatctgggactataggtgcatgccaccatgcttgcttaatttttttgttttttgtagagacgggtttcgctacgttgcctaggctggtcgagcaagtttttaattccttcacagagctgtgcaaccatcaacactacgtagttccaacactttttcttttcttttttttgagacggagtctcgctctgtcgccaggctggagtgcagtggcctgatctcggctcactgcaacctctgcctccccggttcaagcgattctcctgcctcagcctcctgagtagctgggactacaggtgtaagccaccgcgcccggccctttttttttttttttttaagagttaacgatctgttgcccaggccggactacagtggcacctccttatctcggtgaagccttgaattcctgggctcaagcgatcctcccatctcagcctcccgagtagctggggctgcagacatgaaccagcatgcacggctaacttaaaattcttttcttctagagatggggtctcactatattgcccaggctggtcttgaactcctggtctcaagcaatcctcccacctcggactcccaggttgctgagattacaggtgtgagccactgtgctggctgaattccagaactgtttcatcgccttaaatggaaaccccgtccgcattagcagtcacccccgtctcctccaaccacacatccatgcatattctctgtggatctgcctgttctggaaatttctcctttttttttttttttttttgttttgagacagagtcttgccccgtcgcctaggctggagtgcagtggtgcgatcatggctcactgcaacctccgtctcccaggttcaagcgattctcctgcctcagcctcctgagtagctgggattacaggcgccaccacacccggctaattttttgtatttttagtagcgacggggtttcaccatgctgcccaggctggtctcgaactcccaacctcaggtgatccgcccgcctcagcctcccaaagtgctgggattacaggcctgagcccccacgcctggcctggcttccttcatgaaataggtattgaggggaccacagttccgagcccactccccagccaagtttctgcactgatggaggaggcggggctagtcttagggaagcggctagaagacttaagatcttgtctgtaccctgtcccctcacagctgcgtggcttccgacaagctgcttctgcgctatctgtggagaacgatctaaaagtgggattggggctgggggtggtggctcacacctgtaatcccagcagtttcggaggccgaggcgggcagattacctgaggtcaggagttcgagaccagcctggtcaacatggtgaaagagttagtgtcttgttcacggcgaaaccccgtctcgactaaaaatacaaaaattagccaggcgtggtcgtgggcgcctgtaatcccagctactcgggaggctgaggcaggagaatcgcttgaacctgggaggcggaggtggcagtgagccgagatcacgccactgcactccagcctgggtgacagagcaagactccatcttaaaacaaaaacaaacaataaaagtgggattggcatttccctcccgtggtcatatgcgaacgggtgaattaaattctttctggaagaggctggaaaggcactgcatgaatgggacataccgtgggtgccacggaccagctgctgcgaggtacggccggagttctgccgcctcggggaggcctgggtatcccgagaccagagatgctgccttctcaccttgggtgcctgggtctggcccagagcccgtcacacctgggctggtgcagtccaggtgaaacccgccctgccagccacccccaccatctcccggggtgtccctgctgggcctgcattctgacatcacgccttcaaactcaacggtgaggccgcgggaacacgcatctcatatgacgctggagccggaagatggggcttggggctttcagcccttcctctccctctctcttttctcactacaatgttgtgccgccatcaccaccatcctctccagaactttctcctcttcccaaactgaaactctgtccccatgaaacactcactccctgtccccctccccagcccctggcactcactcatcctacttcctgtctctgtgaatctgacgactctagggacttcccaggagtgggatcacacaggatacgtccttttgtgtctggatcctctcactgagcgtgaggtcctcaaggttcatccacgctgtagcccgtgtctggattcccttccttttcatggctgcgtaatattccactgtctggttggaccatgctgtgtttatccactgatgggcgcctggggtggcttccaccctggggctgttgggaatcatgccgctgtgcacttgtgtgtgcaaacacctctttcagtccctgctgtcagttctgtggggtctatccccaggagtgggattgctgggccctatggtaattccgtgtttaccatgtgagaagctgccaggctgggccttgttccatccccaccagccacgcacgagggtctgtttctccatctcctctcccgctcttgtccgaaaccgcacttgttatcagagcctcagcgtcctgcctgttaaatgggctcgtggtttctccaaggctgctggcaggccctgtgaaaggctatcagctccagctgctgttaggcttaggggcacaatggttaactctgagctgtcagggaaccagggaagaaaggctggttggaatctctctttcttttttctttttctttcctttttttctttctttcttttttttttttttagatggggtcttgctctattgcccaggctggagtgcagtggcaccgtcatagcttactgcagcctggacctcctgggctcaagctatcctcccacctcagcctccagagtagctaggaccacaggtttgcaccagcctatccagctaatttttaaaatttttttgtagagacagggacttgctgttgccaggaactactgggttcaagcaatcctcctgcctcggcctctcaaagtgctgtgattacgggtgtgagccacagtgccctgctcgagtctttttgggcatcctttgggattgatctggaaagctccagggaagtgtacaaagcagaacgggcgcctcctcagggcgtgtggacacgcaggcacacgcaggcacatgcagacacgcaggcacacacagacatgcagacacacgcaggcacacgcagacaggcaggcacacgcagacacacgcaggcacacgcagacacgcaggcacacgcagacacgcaggcacacgcaggcacacacagacatgcaggcacacacaggcacacgcagacacgcaggcacacgcaggcacatgcagacacgcaggcacacgcagacacacgcagacaggcaggcacacgcagacacgcaggcacacgcacacgcaggcacacgcagacacgcaggcacacgcaggcacatgcagacacgcaggcacacacagacatgcagacacacgcaggcacacgcagacaggcaggcacacgcagacacgcaggcacacgcagacacaggcacacgcaggcacacgcagacacgcaggcacacgcaggcatacacagacacacaggcacatacagacacacaaaggcagacacatgcagacacaggcacatgcaggcagacacacacatgctcacactcaggtacacgcagacatgcagacacacacacagacacacacagacacatgctcacactcaggtacacgcagacatgcagacacacacacagacacacacagaaccagacacacagatgcatgcagacacacacagacacatgcggcacgggcacgtgctcccagagcaggagttgtgaggctggcaggctccaagactgagtttcccaacccaccgcagtggggcggcctcggatgacgtgcaggcgtgcagcccggacggccccaggggactgcagcaaaaacaaacatgccgggttgattccagcagaacccttcgacccaggcctgcacacggtgtgctgggaatccgccctgggtggggctgacccactccctcctagagttcaccgtggtccctggatgcttgctgaccccagggaggacagggcgggccgcggcaggcgggggacgggcactgcagcagctggtggccaccctcacacgtctgggaaaccaggaacccttgggaactaaacttggtcttttttattttattatgtatttatttatttatttatttaagaaacaggggtcttgcttcactgcccaggctgagtgcaggggtgcaatcacagctcaatgcagcctccacctcctgggctcaagcgatcctcccacctcagcctcctgagtagctgggactacaggtgcgtaccagcccatctgggtaatttttaaaacttttttttacagatggggtctccctgggttgcccaggctggtctcaaactcctgaacgcaagcgatcctgctgcctcagcctcctgagtagctaagattacaggagtgcagcatcaccctggctaatttttaaaatttgttctaaagacagggtctcgctatgtggcccaggctggtctcaaactcctgggctcaagtgatcctcccacctcagcctcccaaagtgccgggattacaggcgtgggcctctgtgcccggcctgaatttgctcttaagtcattcacgctacgtgagtcaccagggctgtcccgtgtgcaaagttccagtaagtctttgtattcctgttggcagggtcaggacaaggtccacctcgcaagctggggctgtggggcagtgagctcagtctctgtgttgcgtaaccaattgccatccatgtggcgccttccaacacacatccacttagtacgtcacggtttgtggggtcaggagtccgggaacagccaagccagggcctctgttcagggtacccccagggctgcagtctgggtgttggttggggctgcgtctcatccaaggctcgcccggggaaggctcttcatccagcattccctcaggctgttggcaccatttgcctccctgtggttgtaggaccggggtccctgtttccttgctggctgttgcctgggggacactcccagctcctatgggccacccttgggtcctagctatcagaccctcctcgggccttctcgcaatgcaccgctcacttcttcacaccaggaaccagcaggggagtgtcttcccacaactctgctaagctagagtcttctgggtgggcgtggtggctcacgcctgtaatcctagcactttgggaggctgaggcaggaaaattgctttaagccaggaggcggaggttgcagtgagccgagatcacgccactgcactccagcctgggtgacagagcaagattccatctcaaaaaaaaaaaaaaaaaaaaaatcagcgtaatattttacatattatatatgcatgtaagcatttgctacatatttatattgagaaataaatctaaaaagaaaatgtagaacatccctatataaaatgttatggtgttattttcctttttttttttttttgagatgaagtcttgctgtcacccaggctggaatgcaatggcgcaatcacagctcactgcagcctcaacctcccaggctccagatcctcccacctcagcccctcgagtagctgggaccacaggtgtgcaccaccacgcccggctaattcttttatttttttgtagagacggaggtctcgttgttgcccaggctggtcttgaactcttgggctcaagtgatcctcccaccttggcctcccaaagtgctgagattacaggcgtgagccaccgcgcccggctacgtgcttgtcttattcagcattatgacatcatagagggtgctgattcttaggggctttgagggtctctgagggctttgaggctcagagatctgctgagacacaggtagcgtaggcagagctgggacaaatcccccgttagagccgggggccctcggagaacccaatacgggacccagaggaccgagggcagcctagtgccaactcctgactcgccctgttctctactatgttaggaagctatttgcagttttgtatttgatagaatctcttcctgaatgcttgctccgatcctttgtggaatgaggcagaatataaataaatcaacagaaaacggtgctccagccacaagcaagagactgcccgtcctgcagggcctaaggaattcacgagcaacgcccgcccaggggctgggctcaatggctggcagccacaggtttcatcgctaaccaggccggagaagctgggcagaaaagcacctgtttgcagcttttcagcaggacctctccccctcagccctgtggacattggggctggatccttctctctggggtggggccgtcctgggcactgcagggtgctgagcagcgtctctggtctccacccactccctgccaggaagccccccaacaccccgagaccaagaatcatcagcttccaaatgttaacatgcacaagtagggaaaccgatgctaaaggattttaaggtcacagagctgggaaggggtggatcggggcctcaaacccctggctcccggccccccaggggccgagctgtggggatgtggatcccagactgaccccggcatggaaaaccaccagcgtggcccggcgccagacctgcttgtctgtcgcttgtctgcgagaggccaggaaatggctgggagagggagagacggttaaacgaaaaaacatcccaagaatgcacatggctcgtctccggccctggcagcccgccccgccggtgcctgcagcagagggtcccgtgatttggggctccgcctcagcatctgcgggatgggtgcccccggccgggcaggtccagacgccaaggtctgcacaggggtcacccggacacacctgactcggaccatgtggctaagtttgttttgaaatttcactgccccagcgtaacccagagtccaggccacgcccagcacggctggctcccgtccgggtctctgtgtcctgcagctcagggtggccagggcgggcgggcaggagggcaggcacctggcacccacccagacctgcgccctggccatcaggctgccccgggaagccgggcgaccgggaagatagcagagtcaacagggcgggtgcaggaaagggcgctccccatgcgagcctctgaagccctcggcacacagccctggaggctgggaatccttgagcgttttcctctgaggtctccaagtgtttatggtaacaagaggagggaggagggcgaggggacggccgccgctgggcagcagctccgcctgctggtcaccttcctcggggacatgcaaggacaagctgccgacggaaggggctttggcagaaatgcggggagcaggggacgcacccccacggacaggggcttttctggttgccaaacgtgcagacgacgggcctgacatccccatttcccaggaactctgtggatgggtgtcctggggctgccgtaagaaagtgccacaaatgggggactgggagggggtcttaaaaccacagacatggatcctctcccagttctggaggccagaagtccaaaatcatggggtctgcaagcctgtgctccctccagaggttccaggggagaacgctttctgcctcctccagttctgggggcgcaggtgtctctcagcttgtgtcctcctcggacacctggccagaatccactaggactttaaaaaaaaccattgcacccccccagtgccatcccagaggacccactcaataaacactggagcaactcccagggcaggggaatgcaggtgtgcccaggggtcagggcccatacacgcagctgagtgagccctgccaaccctaccagtcccagtcctggcccccgacattggtcccggcctggcctgctcaccccttcatgcctctctgtctaaggggcagggataggacgcagccctgctgctctctgtctggttctattttttttttttttttttttttgaggctgagtctcactctgttgcccaggctggagtgcagtggtgtgatctcggctcactgcaacctccgcctcctggtttcaagagattctcctgccttggcctcccaagtagctgggactacaggtgcactccaccatgtccggctaatttttgtatttttagtagagacgaggttttgccatgttagccaggctggtctcgaactcctgacctcaggggatccacctgccttgacctcccaaagtgctgggattgcaggcatgaaccaccgtgcccagctctgtgcctggttctgttttattttattttagagacaaggtcttgctgttacccaggctggagtgcagtggtgcaatcacagctcactgcagcctcaaactcttggcctcaagggatcgtccccactcagcctcccaagtagctgggactacaggtgccaccaagcccagttaatttttacatttttttttttgagacagagtcttagtctgtctcccaggctggagtgcagtggtgcaatcacggctcactgcaacctccccctcccaggttcaagcgattctcctgcctcagcctcccgagtagctgggattacaggtgtgcaccaccacgcccggctaatttttgtatttttagtagagacagggtttcaccatgttggccaggatggtcttgaactcccgatcctagatgctccacccgcctcagcctcccagagtgttgggattacaggcgtgggccactgcgcccggcctctgcctggttgttgaggcagagactggtgtcttcttccctcgtcttcccctcatatcaggcctcaagaaagacttccatgaacgctgtgggaaaatgcactatgatgtccctcactagaagtgccttcgccgcaggcccagcctgaaagtgattaatctctgcttcctcctctcccctcccccaacagagtttgtctaaaagtgcccagaggcctgggtgacagactgatggggggggccgcgggggtggaggggtgatgggggtgggggggtggggggcggagggtgtctctcgggtggcctggagcaccagcagtcaattccttcacttgcaaattgcccaggaggggtcagcagagatactgagttcccaaaccacaggggggtgagaacaggtctgaggctgtggggtgggatgtgggggccccctccctggtccctggtgttgtttaccaaacacagcagcaaagctgtgtctgcagccaggacgcctgcagccaagctcctggctgcactcccaatgcccacttctgcacgtgttttcaccccaccctgcagggatgggacacctccccttcttgagggtgaggacactgtgacatgttcctcaacaagatgcctggccaggccccattcactctgcatcacccaacaggtgttgaaacaacgcatgaaccgtgttatggtctaaggtgtaggctctactcaagataggcacaactttgtggaataaaatatcaaggtttcacaaggtgacaagtggccagttgctcaatttgtgttagagaaacagagaatgtctgggaggggacagggaggtgagaacattttgtggagggtttggcatgcagcctgtgccctataaccctcactttaagccagggtgccagcatcatcctatgtcacctaccacccatctcttgaagtcatcaccaaagtgaaaaagcaaaatggaaatactttgccaaagggacgagagacaaaaagttgaggtccttaatatataaagatctccaaaaaatcaataaaagtgaacaaaccagcttaataaatgtgggatcctggatcagatcatggaacacaaaagcacgtggaaatggaaaaaaggatgaaatttgaatcagccctatacttaatattgcagcaaggttgatttttttagtggtgataaatgttctgtagttatggaagatatcagccaatgggaagctggatgaaaggtgtaagggaacactctgtactatttttgcacctcttctataattcacatattatctcaaaatgtaaaaaataaaattgttaaaagtgaacataatccacaaaaagcattataaatgttcattatgaaaactttcaagctctccagtaataaaaaagattatagatcatacaatgagctgttacttttagcctttaaatgacaatttttttttttgagacagggtcttgctctgttgcccaggctggagtgtagtggtacaattgtgcctcactgcagcttggacttcctgggctcaagagatccacctagctccaccttccaagtagctgggactacaggtgcatgccaccatggctggctaattgttaattttttttttttttttttttttttttttttgagacagagtctcgctctgtcacccaggctggagtgcagtaacttgatcttggctcactgcaacctccacctaccacgttcaagcgattctcctgcctcagcttcccgagtagctaggactgcaggtgcaagccaccatgcccagctattttttgtatttttagtagagatggggtttcaccatgttggccaggatggtctcgatctcttgacctcaggtgatctgcccacctcagcctcccaaagtgctgggattataggcgtgagccactgtgcccagccaaattgttaaatatttttgtagagatggggtcttgctatgttgcccaggttggtctcaaactcttgggcttaagcaatcctcctgcctcagcctcccaaagtaatgagattacaggcatgagccactacacctggtctaactggcaagtattttttttttaaatagataatatccagggatggtcaagttgtgataaatcatggactagcagacagtgggtggaggacattggaataactgttcttgaaagcaaatctccctctggaaaactgtcctaaggatatttttctttaaacctttgtgtgttttctgaaaaaattttttagcaacaagccagtgttacttttgtaaacataaagttgtactattttgatgattaaaaatggacctctcaccccctttgtagactgtggaacccgggctggctcagcacagtcttgcagccgtcttcatggggtgaggttggggaggaccaagagctctcaccttcgactgccccaccctccagctttgcccgccccagcccaagctgtgtggcaagaccccttgttggtgcaggtgctgggggctggtggctgctggcattcccaccttctagagtgactttcacacttcctgatgagtttcccattccgctcagcaggcccataaataggattgtgcagaggtgcatatgcaagcactttacctgaagaattattatggataaaagtaaagaaataataaacaacttagatgcctcccttgagcccaagagtcccaggctacagtgagccctgatggtggcactgcactcctatttaatttaggagattagttcagtaatctgtggtacaaccaaaagataaaacacttaacattcactaaaaaggatgtcgcaaatccatatttgataatgtggaaagattcccataatatattgctaaattaaaaaaaacagattaaagaacagtatcaatagtgtgattctatgattattcagaaaagtccatacatgtgtgggtgtggtgcatattttttaacagtacatgtttggaagaactaaaagtcaccaggatgggttggagaagaggttggctccaggactgaggcagaaaaaaatattatatttctggagcatctttttgggccagaaagtaaggaaactcaaagaattatggcaacgtatcagaaggacacagagccagcttggctgggtgccagtggttcatgcctataatcctaccacttcgggaggctgaggtgggaggatggtttaaggtcaggagctcaagaccagccagggcaacatagggagaccctatctccgcaaagaattaaaaaaaaaaaaaaaaagcgatggcacgtgactgtagttccagctacttgggagactgaggtgggaggattgctagagcccagaagtttgaggctgcagtgagctgtgattgcatcactgtactccagcctaggtgacaggcaagaccttgtctcaaaaaataaaaaaattagccaggcatggtgatgtgtcccagctacttgggaggctgaggagggaggatcacttgagcccaagaggtcaaggctgcagtgaggcatgattgcaacactgcactccagcctgggcgacagggcagaccctgccttaaaaagagagagagagggaaggaaggaggaaggaaggaaggaaggagggagggagggagggaaggaaggaaagaaggaaggaaggagggagggagggatagagggagggagggaagtaaggaaggaaggaaagaaggaaggaaggagggagggacggatggagggagggagggatggagggagggagggaaagaaggaaggaaagaaggaaggagggagggagggacggagggagggagggaaggaaggaaagaaggaaggaaggagggagggagggagggagggatagagggagggagggagggaaggaaggaaggaaagaaggaaggaaggaaggagggagggagggagggaaggaaggaaagaaggaaggagggagggagggatggagggagggagggaaggaaggaaggaaagaaggaaggagggagggagggacggagggagggagggaaggaaggaaggaaggagggagggagggatggagggagggaagaaaagaaggaaggaaggaaggaaagaaggtaggaatgaaggaaggaagggccttgttcttagaaaatatccaccaagatctttagggttaatggggcatgatgtctccaacttaatttcaaatgactggaaataaattaatatgcatacatgcacaattacatacatataattctgtgtatacataactgcataataatatatctagcatatatgccatataagtaactatctttctgcgtatatatagatatatacatacatatccacctgcaatttatacataaatacatagacacacataaatgtgtatacacacacacggtgaacgatggagtgagagaataataaaagaaaaaatagggcaaggcaagtgtaaacagttggcatatttgagtataaagagtatacgaagtgcctgcggctattcttgcaacttctccgtaagttcaaaagtatattgaaaacagccagttagaaacaggcagcctggaagagattttaacagtcttcatctccagattgggattaccaggggaacttttccttttaaaaacaaaatggagacatcattcatataccataaaattcaccctcataaagtgtaaaattcagtaattttttttttgagacagaggcttgccctgtttcccaggctggagtgcagtggcgcgatctcggctcactgtaacctccgcctcccgggttcacgccattctcctgcctcagcctcccgagtagctgggattacaggcacccgccaccacgcccggctatttttttgtatttttagtagagacggggtttcaccatgttggccaggatggtctcactctcttgacctcgtgatccacccgcctcggcctcccaaagtgctgggattacaggcgtgaaccgccgtgccccggccaaaatgtattgatttttcagtatccctttttctttaaatctttgtgagttttctgaaatattttttcagcaacaagccagtgttacttttgtaaacataaagttgtacgattttgatgatgaaaaacggaactctcaccccctttgtagacttgtggaaccggggctggctcagcacagtcttgcagccgtcttgatggggtgagatcggggaggatcaagagctcccaccttccactgccccaccctccagctttgcccgccccagcccaagctgtgtggcaagaccccttgttggtgcaggtgctgggggctggtggctgctggcattcccaccttctagagtgactttcacactccctgatgagtttcccattccgctcagcaggcccataaattcaaagcgagggccgcaaatggggaatctgggatggcgcgtctggcttggggggctgggagccagcgggcccagacaagctgctggtgacctcggtcccccaagagctcagctgaggctgaaagggaaggatggggagggaaggacactcacacactctggaaatgagggcaaatcccagccctgacatttgacagccaagggctcaaatgaaaaagaaggtagaatttacacacacgcacgcaagcatccctcaatgggaactcacagtgaatatcgtgtgtagatccagtagaatgtcaccttggccgggtgcagtggctcacgcctgtaatcccagcactttgggaggctgaggtgggcggattatttgaggtcaggagtttgaaaccagcctggccaaaatggtgaaaccctgtctctactaaaaatacaaaaattagccgggtgtggtgtcacgtgcctgtagtcccagctactcgggaggctgaggcaggagaatcgcttgagccggggaggcagaggttgcagtgagcagagattgtgccaccgcactccagcctgggtgacagagcgggactccatctcaaaaaaaaaaaaaaaaaaaaaaaaagaatgtcaccttgaaatcataatgacagtggagaatcctggcatccactaccacgcaacaccacatccggctaatttttggccccagacgtcacccgatgtcccccaggggctaggatcagccgcaggttaggacccctgggttggaggtttcaccacggagagttgcggcggcaagaagacaccaggaggaagtgacctgcacacaatcaccagatcgtccctgagcatctggctctagggtctctgcctggaccgaagcattcccaggtgcagacccaggggtctctcctgtccctccgacctcacctgcgtaccctgcgttgcttcctctgccggggaagctcacccacgttctcaggtcctgggcggaagggcagagggctccccgggcacaatgtcttctgatgagaatcacagctgctgagatgcaactgcaaggggctgggaaagttcctgggacccaaaggagctgtgagatctagcgcctgggatggcagaggctctggccggtgaggacaacagccggcgtcagctcgggggtcggtacgcaggcggccaccttgtaacggccacaaacgggcttcaaaggggaggcaggcctgggctgctgagtcacccgggcctcatgcagttcacaaaaagctgtaactcgaggcagcatcacaccgaccgtggaagcatggaagggagggggacgctgtctcagcctccaggagctacctggcaggctgaggcaggagaatcacttgaacctgggaggcagaggttgcggtgagccaagatcgtgccactgcactccagcctgggcgacacagcaagactctcatctcaagaaaagagagagaaagagagaaggaaggaaggaaggaaggaaggaaggaaagaaaagaaaagaaggagagagagagagaaggaaggaaggaaagaaaagaaaaagaaagaaagaacaggaacaagataagggtggccactctcactgtttctattcagtattgttattgcaaattcaagccagggcaactgggcatgaaaaggaaatgaaaagcatccagattggagcaagagaagaaaaaccatctctctatttgcaaacggcctgttgtggtgtaaaaggtccccgggtacaatttgtgcagcagaaatacggcacttcacaggctgcttagaaacctagcaagtcccttgagcacaaactattttcctaagcttggtgggggcgtgagagggtggccggggactggtgacaatgttgtttgtgcactgggagagtccggctgaattgcaactggcctttacatcctaatcagctccctgaggacaacccgaaagacatcagattaaaaagtcacaatgagataaaccagcacgacgcggctctctgcaaagcgacaggtagtaaacagaccttaacgcacgtcatgaggtttgtttttcttttaaaagtcaacagctggtgaatcgcacagggccgggcagggcggtcaaagggcccgttcccccggctgggaaaaaagcaggagcccagggcggcggcagctggacgcgggccccgtggaactttctcccgtcagtcaggggccgtatttcttagccatcctcctctgaccttcatttcaaaccgcctgctgacgcatctaaccttggcccgttccgtgggaactccagactcagggtgaccaaccccagctgggttacccagggttgtcctggttggagtggctccaagtcctcagacccagcaaacccaggcttgctgatcacaccgcagaccccaccaggtggtcatctttctggggaaactggcttcttttcctccccgactcccttgctttgtcttcgtggtggcacctctcttcccaggtgctcaggtgtgacatcagccgtcccttgctggccctggtgccagctgactcccaggtctcctttctcttctttaagatggagtctccctctgtgacccaggctggagtgtaatggcgcgatcttggctcaccacaacctcccccttccaggttcaagcgattctcctgcctcagcctcccaagtagctgggattacaggcatgagccaccacacctggctaattttgtatttttagtagagatggggtttctccaccttggtcaggctggtctcgaactcccaacctcaggtgatccgcctgcctcagcctcccaaagtgctgggattccaggcatgagccaccacgcccggccgtctctttcttctaagatggagtctccctccgtggcccaggctggagtgcagtggcgcgatatcagctcactgtaacctccgcctcctgggttcaagtgattctcctgcctcagcctcccaggtagctgggactacaggtgcacttttttttttttttttttttttttaaatagcagagatggtgttttgccatgttgaacaggctggtcttgaactcctgacctcaagtgatccgtccgccttggcctccctaagtgctgagatcacaggcatgagccaccatgcctggcctcccagatgtcatttcttgcagctctcggagtcttccacgtgtctctggatcttcctgtgtcattcccacctccgctgtttgactctggtcccctcctcccatgtcagatgatggcagcagtaaggaaatgatgccttgatttagctcttttaggccctgcgcgtagggggttgtactaagtccaggagcatttaaaacctcactgcatacgcactacaacgtggatgaactccgaaaaatcacactcagtgagagaagccagacaaaaggccacacagtgtgtgatcccattgacatgaaatgttcagaacaggccagtctcgctctgtcgcccaggctggagtacagtgacatgatctcagctcactgcaacctccacctcccgggttcaagcgattcttctacctcagcctcccgagtagcttgaattacagacatgcactgccgtactcagctaatttttgtatttttagtagagacagggtttcaccctgttggccaggctggtctcgaactcctgacctcaagtgatccacctgcctcggcctcccaaagtgctgggattagaggtgtgtgagtcactgtgcctggcctttatagcatataattttatctcaataaagctgttaggaaataaactataggtaacaacattatcaagaggttgggcctcttatccaggtggatttttcaaatgaatcagtttttaaaagtaccattaaaaaacaaaactataagaggtaaggcaaaaaatagaacaggtaaagaaaatgggtcagtcttccttttttctctatcgggcacataacaattttccatatcttatagataaaactgaggcttagaaatggtagaattgtgtgaattatatcttgataaagctgtcgtctatatctatgtctctatatctattcatccatccacccatccattcactcatctatccattcatccacccatctgttcatccatccatccatccatccatccatccacccacccatccacccacccaaccaaccatccatccatccgcccactcatccattcacccattcatccatccatccacccacccacccacccatccatccatctatccattcatccatccatccgtccacccacctatccattcacccattcattcatccatccacccatccattcatccatccatccatccacccattcatccatccatccatccatccatccacccacccatccacccacctaaccaaccaaccaaccatccatccatccacccaaccaaccatccacccatccgcccacccaaccaactatccatccatccactcatccatccacccacccatccattcacccatccatccatccacccatccatccatttatccatccattcatccatccatccaaccatccatttactcatccatccatccatccacatacatacatactagaaatggtagaattgcaactagaattcaatatttgcaaatcctggtgcaataaatattattcttactcattttaaaatgttaatatctactttatttttcaaagttgagcacgatataagtatgttgttccttggattcctgatgctctcagtaacctagcaactcagcacctcacagagaacaagaagaacctcttgcgcggtaggtttggcttgcaaacaagccgttccacgctggaaggctgtgtcaaccgatgatgtggaagaataatcatccctccttgctgtttcttatgagatttgtcaggcatactcctacttgccaatactatttgccaacatactactccgcctcctctctgtttcctctcttgtaagatggcaataatgcatgcaggatgatttccatccctttctttaaaccttttggtatttttaagattttctagtatgtcactgttttcgtaatttgaaaataaagggttttttttttttttttttttttaagggagagattataggggactgagtgtgtggccttgagtttgtctgtttccaaactccctattgaggctgttcaaccaaagaaccaaagttgggggaaagtctatcccaaggctccagcccaaaggaagctctcttctacaatgggtgtgttaggatggaggagagccacaaagccagtaaaaaggcacatagcaaactggaagaaaatagtaatatgtagcatatgtaacaaagtgttagtgcctgtcatatgtaaagagcacctacaaatcaataagaaaaactcaatagccaaatagaagatatacagaggtacttagtgcaaagatactaacaatcagaaaagaaaggaataggtgactgatctcactgatggccaaataaatgaatattataacaccaaagagacactaatttcacataactggctggcaaaacttttaaattcagttgataaccattatggcaaggctgtgggggaactggcattttcactcactgttgacaggagttcaagttgctataaactttgtggaaggttattcgtcaatgattaacagaattgtaaatgccactatcttctaaagctgcatttctgcttttaggaatttacctcctgagatatttagacaaggtcaaaagtgatgtataccatgatgtttctgctgcaacattatttggatgtaagaaaaactgtaaagatcagtagtgtgttcttcaagtcactctggcatatccatacacaagaacgcgctaactaaaaagaatgaagctcactgatcacactgacaaaaaatggcaaccaaaaacaactcttaacatttttcaaaaggctgaaaagtagagttgctacattaaaaaaaaattgctccttctatcacagcatttttatttctagcaatgtggcagaaaacatcactttaaatctctcctcctctaaaacccaagcaagactggatgaaagaaatgaacaaaggccaggtgcagtggctcatgcctgtaatcccagcactttgggagactgaggcaggaagatcgcttgagcccaggagttcatgaccagcctgggaaacatagcaagatcctatctctagaaaaaatttttaaaaagcatccaggtgtgctggtatgtgcccatggtcccagctactcaggacgttgaggcagaaggattgcttgagcccaggaggtcgaggctctagtgagctatgattgcatcgtttcactccagcctgggtgacagagcaacaaggagagggaaggaaggggaggggaggggagggggaggggaaggaaggaaggagagggagggagggaagagagaaagaaagaaagaaagagagagagagagagggagggagggagagagggagagaggcaggggagaggagaaggaaaaaaagaaagaagaaaacgaaggaaggaaggaaagaaggaaggaaggagagggagggaaggaaggaaggaaggacggaagaaagaaagaaagggagggagggagagagggacggagggaggggaaaggagaagggaaaaaaagaaagaagaaaaggaaggaaggaaagaaggaaggaaggaaggagagggagggaggaaaaaaaaagaaaagaaaatgcatactctttctaaccaacagctgaggtcacaaaaaagtaagaaaatccagcacagactaaaaacttcaaagaggacagggcaccgggtggtgagaagtggcctgtggccacccagattgaggggagaggcttctggtcttggtcaccaacggcctgatgttgttcttaatctctgcctctcttaaaaatgtatagtggaaaattccttttttaaaaaaaaaacttggaatgtttgtctttattttgtgctttatattttcaaagtgaaaagaaatagtattgagtcaatttttgttttttaaaatattcgttctatatatttacaagccttcaagctgctctaaagatttcaaaagtattaagagtaggactgggcgtggtggctcacacctgtaatcccagcactttgggaggctgaggtaggtggatcacctgaggtcagaagttcgagaccagcccgggcaacaaggcgaaacctcgtctctactaaaaatacaaaaattagccgggcatgggggcggctgcctgtagtcccagctactaggggtgctgaggcaggagaatcgcttgaacctgggacacggagcttgcagtgagccgagattgtgccactgcactcctgcctgggcaacagagtgagactccatctaaaaaaaaaaaaaaattgcaaatacttttcccggggtagcactttttttttttttttaaacaatccttggagttctgtggtccatgccatttccttctgtttcaatgttatatatgttttgattactattgtgatgttttaagttttctgaagcaagctgagaggcaggccgaaatatttgatgccaaaaaaaaaaaaaaactttcttacctcattcaccccaaaccttctcaaatctggattaaatactatactttaaaacaaacatgaggtgcttctgaaggggaggaaaatttatttctctgcttttctattatacaagttgtttacagaaactgcaaatcaaggccgggcacagtggctcacgcctgtaatcccagcgctttgggaggccaagacgggcggatcacctgagctcaggagttcgagaccagcctggccaacatggagaaaccccatctctactaaaaatacaaaacacttagctgggtgtggtggtgggcacctgtagtcccagctacttgggaggctgaggcaggagaatcgcttgaacctgggaggtagaggttgcagtgagccgagatatcacaccactgcactccagcctaggcgacagagtgagactccctcaagaaagaaagaaagaaggaaagaaagaaggagggaaggaaggaaggaaggaaggaaggaaggaaggaaggaaggaggaagaaagaaactgcaaatttaaaaaattacatatagtggaaaatttcaaacacagcctgaagcacgcaggccaggacgaggtctctctgagtgtcgtcacctcctgcaacgggaattaacattctgcccttcttctgttctcacttctctctccagctttgcacgggtatttcacacaaattcaagacatcatatgactttgcctgtagaaccttcagaatgttctctaatcactgaagctttctgatttcccaacacagaaccacccaatcaaattaacactgtcttattatcaacttgctccatgattatcaacaataatttcctgttaccaataaccagcctgtgacccattgtccatgattatctcaaaaatgtctttaatggcccggcgtggtggctcacgtctgtaatcccagccctttgggaggctgaggcgagctgattgcttcaggacaggagtttgagaccagcctgggcaacataccaagacctcatctctacaaaaaatacaaaaaaattagctgggcatggtggcacgtacctgtagtcccagctatttgaaaggatgaggtgggaggatcgcttgagcccaggtggtcaaggttgcagtgaaccatgatggcaccactgcactccagcctgggcaacagagcgagaccctgtctcaaaagaaattaaatttttttttttttgagacggagtctcactctgttgcccaggctggagtgcagtggcgtgatcttggctcactgcaacctccacctcccgggttcaagcgattctcctgcctcagcctcccaagtagctggcattacaggcgcccgccaccacgtccggctaatttttgtatttttagtagagacggggttttgccatgttggtcaggccggtcttgaactcctgacctcagttgattgatccacacacctcagcctcccaaagtgctgggattataggtgtgagccaccatgcccggctgaaaggaaattaaatttaagggccgagtgcagtggctcatgcctgtaatcccagcactttgggaggccgaggcgggtggattgcctgagctcaggagtttgagaccagcctgggcaacatagcaaaactccgtctctagtaaaaatacaaaaaattagccgggcgtggtggcgggtgcctgtaatcccagctactcgggaggctgaggcaggagaatggcgtgaacccgggaggcggagcttgcagcgagccaagatcgcaccactgcactccagcctgggcaacagagtgagactctgtctcaaaaaaaaaaaaaaagaaattaaatttaaaaaggtaaaaagcagctcaggaccgccaatgtacaatgcactccatatggctgtacgtatctatgtgagtgtgcatgtgtaggaaaagtctagggagtttcagtggttagacgacaatgaccaggacaactgtgtgagcagcacctgtgtggcactgagtcatctcaggctctccactcggctctgtccatcaacgaccgaatccagctctcacggcgactctacgctgcatgcttgttactctactacagaggaggaagcaacgcttacgaaaaccaaggaccagaagaactcacaatcaaaactagtgggcggccgggcgcggtggctcatatctgtaatctcagcactttgagaggccgaggcgggcggatcacctgaggtcaggagtttgggaccagcatggccaacatggtgaaaccccatctctactgaaaatacaaaaattagccgggtgcggtggtgcatgcctgtaatcccagctacttgggaggctgagacaggagaatcgcttgaacccaggaggtggaggttgcagtgagctgagatcgtgcctctgcactgcagcctgggcgacagagtgagagtcggtccctaaaattaaaataaaaaatagtaggcaggcccagcgcggggctcacacctgcaatcccagcactttgaaaggctgaggcaggaaaatcacttgagcccaggagtttcagaccagcctgggtaacatagtgagaccccgtctcaattaaaattaaaaaaaaattaagcaggtgtagtgatatccacctgtggtcccagctactcaggaggttgaggtgggaggatcgcttgagtccaagaggttgaggctgtagtgagccatgattatgccactgcactccagcctgggtgacaaagtgagaccctgtcccccccccaaaaaaaaaagtgggcaaatatcgacccagttgttctcctttcacgttctgcactgatgatcagttcccatccaccccacactgttaacagtggttaattctggggagtgagatttgtgatgaagatgtctccattctcactcctgcagtacgagacttctttacaaatatattctcaacagggtgaacatcaattcttggggagatgaaaacaaattttactttttttatggattaagcccagaaaacagaacataaacagatacacagtctatctatgatattgaaatttcacaggtataggctgggctcggtggctcacacctgcaatcccagcacttttggaggctgaggtgggaagatcacttgaggccaggagttcaagatcatcctggacaacatagcaagacccaatctctagaaagaataaaaatttaaaaattatccaggcatggtggtgtgcacctgttatcccagctttggtgactgaggcgggaggattgcttgagcctgggagttggaagctgctgcagggagctgagatggcgttactgcactccagcttgagtgacagagaaagaagatcctgtctctaagataaaaacaaacaaaaactccattatataataatgctacttggggccagtcacagtggctcacgcctgtaatcctaacactgtgggaggccgaggcaggcggatcacctaaggtcaggagtttgagaccagcctggccaacatggtgaaaccccgtgtctactaaaaatacaaaaattagctgggcgtggtggcgggcacctgtaatcttagctactcaggaggctgaggcaggagaatcgcttgaacccaggaggtggaggttgcagtgagccgagatcacgccactgcactccagcctgggtgacaagagcaaaactccttctcaaaaataataataataaggccgagtgtggtggctcacacctgtaatcccagcactttgggaggccgaggtgggtggatcacgaggtcagcagatcgagaccatcctggctaacacggtgaaaccccgtctctactaaaaatacaaaaaattagccaggcgtggtggcgggcgcctgtagtgccagctactcgggaggctgaggcaggagaatggcgtgaacccaggaggcagagcttgcagtgagccgagattgcgccactgcactccagcctgggcaacagagtgagactctgtttcaaaaaaaaaaaaaaaaaagaaattaaatttagaaaggtaaaaagcagctcaggactgccaatgtacaatgcgctccatattgctgtacgtatctatgtgagtgtgcatgtgtaggaaaagtctagggagtttcagtggttagacgacaatgaccaggacaactgtgtgagcagcacctgtgtggcactgagtcatctcaggctctccactcggctctgtccatcaacgaccgaatccagctctcacggcgactctacgctgcatgcttgttactctactacagaggaggaagcaacgcttacgaaaaccaaggaccaaaagaactcacaatcaaaactagtgggcggccgggcgcggtggctcatatctgttaatcccagcactttgggaggccaaggtgggcggatcacctgaggtcaggagttcgagaccagcctggccaacatggtgaaaccacatctctactgaaaatacagaattggccgggcgtggtggctcacgcctgtactcccagcactttgggaggccgaggcgggcggatcacgaggtcaggagatcgagaccatcctggctaacacggtgaaaccccatctctactaaaaatacaaaaaattagctgggtgtggtggcgggcgcctgtagtcccagctactcgggaggctgaggcaggagaatggtgtgaacccaggaggcagagcttgcagtgagctgagatcgcgccactgcactccagcctgagcgacagagcgagactccgtctcaaaaaaaatgaaaagtaataaaataataataataataataataataataataataataataataataatgctacttgggcatcttccgtcaaaagaatcagacatcgggtgcatttaaatctcttgccaccgttattctttctaaggagccactaggaaaaggatgtctcaaaagaaggtgatcacggaaaaagaaagcttatgaaacactgacttctgtaatcacgttttcagttgaaagaaatggaaactgatctaacttccagctcacctcaagctggaaagaagtctagtttctagaagcatctccaaaattggaaagtgaagtttctagcatacagttccaccgagggcccatgatgaagagggggagaggcgggcacgaggcgaagcgggtgccccgcgctcggctggaaaaagccaatgtcaccgggctgtgctatttgcttgtgggagggacgcctggggtgggggcgtgccgctggttgctccgccgcagacaccacgtggtgctttttgaactgatcagagccccagcctgcctgctttgctgtcccgggctgacctccgaaaacaccgcactttcccctcgctgacttggtagatgtctgtctgtctgcttgagtatctcgaagatctgaggtttccattccagcagaataaatactaggagggcccaccccttcctcctcccagccgaggctggatgaatccaaataaacccagctggtggggaagagcatttctaggacttcggcgggagaaagcaccgcccacccgggtgggtttccaggaggtggaggtgcggacctgggaggggggccctcgggcagccctgccatgcagccgcgtcactccgcctgcctgatgtcacaggagctgggggagtttgggtatttcatgaagctgttgagttattgtggctttggtttgtgacaccggcgttcaggcacggcctaaaggcaacatcaaagacggtgcatgaaaaccgggggttaggccgggcgcggtggctcacgcctgtaatcccagcactttgggagaccgaggcaggcggatcacctgcggtcaggagttcgagaccagcctgggcaatacggcgaaaccccgtctctactaaaaatacaaaaattagccgggggtggtggtgctggcctgtgatcccagctactcaggaggctgaggcaggagaatcgcttgagccctggaggtggaggttgcagagagctgagatggcgccaccgcactccagcctgggcaacagagcaagactccatctcaaaaaaaaaaaaaaattagattgtggtaatggttacacaactctggatattctaaaaaccactgaattgtacactttaaaaagtgaattctatggcatgtaaaaatctcaataaagctgtcatataaaataaatatatataaatatgatgccaaaatatatacataaatatggtaataaaaaattaaggcccttaaacagcttgtgtttatgtagattttagctatactcctgttacaagttaacataatcccattaaatatttttttaaaccatatattttatattaggaggatgacacgtttaagtgaaaagtaactatttttcaaaaaaaaaaaacattgaggggaaatagtggcattgttttacatttttgcaaatttctttcatgtctggcttaatagaagacagctggattcttgtataagcctctgagttcaatccactgtgatatcaaacgtcatgcaacctctgaaaactccaccatctgtgtgggagagactgggaggaaggagacccagagtatcttggcatttttttttttttttttttgtgagatggagtctcgctctgtcacccaggctggagtgcagtggcgcaatctcagctcacttcaacctccgcctcctgggttcaagtgattctcctgcctcagcctcccaagtagctgggattacaggcgccaccaccacacctggctaatttttttttttaatttttagtagagacagggtttcaccatgttggccaggctggtctcgaactcctgagctcaggtgatccacccaccttgacctctcaaagcgctgggattacaggtgtgagccacagtgcctggcttctatcttagcagttttgacctagtggtcccccaccaaaagggtctcagagaccaacccctgggtgtccctggaccacactttgagaactccaatacacaggtattctctctacttcacagaagagaaaatgcgatccaagatggtaataaacctgctcaagtcctcaaagctgaaaagtacggctgaaggagaataaaaaagagaaacataaagcagttgtggtggtgtgtgcctgtgctcccagctacttgggaggctgaagtggtaggatcgcttgagcccgggagtttgaggctgcagtgagctaggatcacgccactacactccagcctgggtgacaaggagagacctcccccccgccaccatctccaaaaacaaattattacttatgtaaaaaatagaactaaggaaggtttgcttgactccaaagctgtgttctttgcatccattctagttccatccagatggcccggggtacagctgggatgcctgttgtccctaaaaaccatggggcacaagtaggtaaaccctagagtaggtaactcctcaattcagctcaaccactatctgaccagcctccagttaccaggcagtgtgtttccccagccatgtggactcagtcctgccacggcgcggctcgtgcctattgcagatacatgtacatgcttgcaatatacgtgtctgtctcccctgctctacaatgagctccccaggaacaaggactgggcaattttttttggcttcctgtctccactgtttggcagcaggaaaagagaggtgcctgaagaaagggtaacagagcaatgcaatcccccgatgtcagatttttattgaggaaaagaaaggcagtgaaggccgggcatggtggctcacgtctgtaatcccaagcacgttgggaggccggggcaggaggatcccttgagcccaggagttcgagaccagcctgagcaacatggcgagaccctgtctttataaaaaaattagccgggcatggtggtgtgagcctgtagtcccagctactagggaggttgaagcgggaggctcacttaaggaggctgaggttgcagtgagttatgatttcatcactgcacttcagcctgggccacagagtaagaccctgtctcagaaagaagaaaagagaagacaggggaggggaggggaggagaggagaggggaggagagcagtggaatcccagatgatccttccagaatctgcaagcagcactgtggaggcaccctggggaagaaagtctgctaggatctggagaagcactagaagccgggcacagtggctcacgcctgtaatcccagcactctgggaggccgagatgggcaggtcacctgaggtcaggagttcgagaccagcctggccaacatggtgaaaccccgtctctactaaaaatgcaaaaattagccgggcgtggtggtgcacgcctgtaatctcagctacttgggaggctgagacaggaggattgcttgaacccgggaggcagaggttgcagtgagctgagatcgcgccactgcactccagcctgggcgacagagcgagactccgtctcaaaacaacaacagaaaaagcagcactgaggactgggctgcgggctgcgtcctctgcaggccctggctcccctgtacccaccccctcctgcacgcttttaagcagatccagcactcccttcagggcgctggggaggagctgccagcagacaggaatgcgctgtgcagaagcagcaggttctgccagctcctcccgagcctgcagggaaatgcaggcagatctgtggcctcgcacaggcggacagacgggcagcagggatctccaaccgggccccggagcacgaaccactacgcaatcgtcacagcatgtgctaccttccgtggtgttctgggaatctaaatcaatcccatacgctggacagcaagccagaaacggaagccaatctcgggctgggcagagggccacccggccctcccctcaccaccacccctcccttttccttcaatcagaattgccttttataggcaggttgatagttcacagctggaagggggctcactgcggctctgcaaggaaagatgcgctacccacccttttctctctttctctttctttttctctttttctttctttctttctttctttctttttgtttcttcctttcttcctttctttcttttctttctctttctttctttctctctctctttccttccttcctttcttttctttctccctttcctttccccttccttccttccctttctttctttctttttctcttttctgttctgttctgttcttttttttgatggagtttcgctcttgttgcccaggctggagcacaatagcacagtcttgcctcactgaaacctccgcctcccgggttcaagcgatcctcctgcctcagcctcccgagtagctgggattacaggtgcgcaccaccatgcctggctaatttttgtatttttagtagagacggggtttcaccgtgttagccagggtgatctcgatctcctgacctcgtgatccacccgcctcggcctcccaaagtgctaggattacaggcgtgagccgccgtgcccggcctaaagctgtgttctttctgttccacaggctgcagagagggagctgatgccagaatgagggggaacccccggagcttctcgcatcgggtgggaccggcatccggtgagaccgcggtggctctctggggctgaaaattccaagcagagtagcccgaggaatccagccatccccgagggttcagaaatgcaaatcagggctgtgtattcacagcctggactggagatcgaccaaaaactatgcagggctcacccttgcggggcggcggctaaatttaggaaaccaaccatctggagaatgcaggcatcagaagcccctgcagctaggaggatcatttcagttcatttttattcactgttcatagatctcccagtttttcctagcgtgttcaagctggaaaggatttcagagattgtgtcacctagatttattttacagaaggaggaactaagcgtttaagggagaagtgcctgttcttttattattattattattattttattttttgagacagagtctcgctctgtcacccaggctggagtgcagtggtgcaatctcggctcactgcaagctctgcctcctgggttcacgccattctcctgcctcagcctcctgagtagctgggactacaggcgcccgccaccacgccccgctaattttttgtatttttagtagagacggggtttcactgtgttagccaggatggtatcgatctcttgacctcgtgatccacccgcctcggccccccaaagtgctaggattacaggcgtgagccaccgtgccgggtctcgagaagtgcctgttttaacacactgaaaagtggtcttagccaggtgcagcataatatgcccgtctcccagcactttgggaggccgaggcaggaggatcgcttgaggccaggagtttgagaccagcctgggcaacatagcaagaccccatcactacaaaaaataaaaataaattagccggatgtggtggcgtgtgcttgtggtcccagctactctggaggctgaagcaggaggatggcttgaaccaggaagtcgaggctgcagtgagctaggactgcgccactgcactccagcctgggcaacggagcaagaccctgcttcaaaaaaaaaaaaaaatgaatgaaaggaaggaaggaaggaagcgagggagggagggagggagggagcgagggagggaaggaaggaaggaagcgagggacagagggaggaaaaagagaaagttttctgccctagacactccagcctgggcaacggagcaagaccctccttcaaaaaaaaaaaaaaaaagaatgaatggaaggaaggaaggaagggagggagtggggagggagggagggaaaagagaaagttttctgccctattatgtgattttcacaccaccccaagttcaagaacaaagtgtggtttgtttgaatgcttttcccagacagagatgcagggcagtggcgagaaggaaacaatccagtggcggcttcccctctcttagaagtattaggcccaagaaaccacctgaaatcctgggatgaactagattctgtcgttggagtccaagtccttttggctgtcagtatgagtggcttgaagccgctataacaagtcacacggatctggtggcttaaaacaatggaaatggattctctatggctctggaggtcagaaatctagatgtgggcaaggccgtgctccctctggaggctccaggggaggatccttcctgcctcctccagcttctggggcctccaggcatcctctggcttgagcccacatggctccagtctctgcctccatctccccatgcctttcctcatgtgtcaaatctcactgttgttttttttgtttgttttttgagacaaggtctctctctgttgcccaggttggagtgcaccagacaccatctcggctcactgcaacctccgcctcctgggttcaagtgattctcctgcctcagcctcctgagtagctgggactacaggcacctgccaccatgcccagctaatttttgtattattagtagagacggggtttcaccatgttggccaaacaggtctcaaacttgtggcctcaagtgatcctcctgcctcagcctcccaaagtgctgggattacaggtgtgagccaccacacctggccaaatctcacttttttttttttttttttttttttgaggcagagtcttgctttgttgcccaggctggagtgcagtggcttgatcttggcttactgcaacctctgcctcctcagctgaagtgattctcctgcctcagcctcccgagtagctgggattacaggcatgcgccaccacacccagctaatttttgtatttttagtagagacggggtttcaccatgttggccagcatggtctcgatctcctgacctcgtgatctgcccgccttggcctcccaaagtgctgggatgacaggtgtgagccaccgcagcctgccaaaatctcactcttataaggacatttgtaattgtttagggtccacctggagaacccaggataatctgccgtctgaagatccttcatgtgatcacttctgcgacctctttgtcctataagggaaaattcacaggttccagacatttaggagccaatatctttgggggcattactcacacgacatacaaagtctcttttcagggcaaacatagatgctcacaggaaatgcctccatgccccgcagtcgggcaagcttccaagcaagcaagccgcttttaagagtcaggaagaggctgggtggctcacgcccgtaatcccagcactgtgggaggccgaggtgggtggattgcttgagcccaggagtttgagaccagcctgggcaacatagtgagatcccatctctacaaaaaatacaaaaattagctgggcgtggtggtgtgcacctgtagtccttggggggctgaggtgggaggatcacttgagcccaggagttggaggctacagtgagccgagattgcaccactgcactccaacctgcgtgacaaagttagactctgtttctggccaggtgcagtggctcatgcctgtaatcccagcactttgggaaactgaggtgggcagatcacctgaggtcaggagttcgagaccagcctgaccaacatggagaaaccccatctctactaaaaatacaaaaattagctgggtgtggtggtgcacgcctgtaatcccagctattcaggaggctgaggcagcagaatcgcttgaacccgggaggtggaggttgcggtgagccaagattgtgccactgcactccagcctgggcaacaagagtgaaactctgtctcaaaaaaaaataattaattaattaattaattaattaatttaaaaaaaaagttagaccctgtctcaaaaataaaaagtcaggatgagagaaggcagccaaggcaaggaagaccaataacatgctcggatggtgcagtctctttggaacattccaaaactaaactgagaaggttcccattctcggtgatgacaagtttctggaactagatagatagtgctggtgtttgcacgcagtgttcatggaaataatgccatggagttgcaaacttttgaacagtaaacaagggccgggcaccgtggctcatgcctgtaatcccagcacctcaggaggccgaggcggggggatcatttgagcccaggattttgagaccagcctgggcaacacagcgagaccctgtctccacgaaaaatttaaaaattagctgggcatggtggtgtgtgtctgtagtcccagctactcaagaggctgaggtgggaggatcacttgagcccaggaggttgaggctgcagtgagctgtgatcgcaccactgcactccagcctgggcgacagagcaagaccctgtgtcaaaaaaaaaaaagaaggccaggtgtggtggctcacacctgtaatcccagcactttgggaggtcgaggcaggcagatcatctgaggtcgggagttcaagaccagcctggccaacatggagaaaccctaacatttttagtttctactaaaaattcaaaaaattagccgagcatgatggcaggcgcctgttatcccagctacttgggaggctgaggcaggagaattgcttgaacctgggaggcagaggttgcagtgagccgagatcgcaccattgcactccagcctgggcgacaagagtgaaactccatctcaaaaagaaaaaaaaaaagaaagactaaaatggtaaaaaaaaaaaaaaaaagaaagaaagaaaagaaaaaagaaaaagaaatacatattaggatggggcaagctaaactacattgttatgtattttaacaacacataaaacccacttggggccagtctgcaagtacctcccatgtaggctcagcctggcacttgaaccccgtgccctccgccccccgcccctcccagtggcgtctccgcttctcacttcagaggcagagctgtcatcgtgggcactgggaagtagcctgcagtgtcagcacagaccggcgctcaccaacgacacggcacggaggctttctagggagcagtccccccaggacagcaatacgttcaggcgacagcgacacagggcagcaacagcggttccctcctggcaggcagccagacgcacacacgcacgcagaccacaccatccagaaagttcacctgcgacctgagacgcagctctttgagggagatcagaagatcagatggtatttgagaaaaaaaaaaaaaaaaaggttaagccaagtcagtgggaaggtggaggaaaaaaaaaataaataaaggttaggctgaggtcgccgccctgccactcatgacacagagcgtggcacgtcggtttcacacctaaaagtcagaacgattcacaggtggcgaagcgtgggtggaggaaaagagcggggatgtctgaggagcagaaagaccgaaacgcaagagtaatacctgctgcggagaggttccgcccacgtgggatttgcccctgggaaaaaaaaaaaaagtccccgaagcccctgcaaggcaaggcctgcgggctggagggacgggctcttcacacacacgggaggacagagatcgtctctggaggtgggcgccccagcaggcacactgacggcctcggtgcagctcccctgcacccccaaatgacgcaggtcagtaatccagggacgggcagcaggctcacgtgtccccagatgcaggcacacctgtgcctctcgagtcatctgcagagtcacgagaccagcaacctggaaacctggaggagctcccctggctgccaccggacaccccagggcaaggggccgggtgcctcccgggcaaccccctctctctgcagcaggggatgcagatggcagagtctcaaaggccttccctgcatggggcagacacggaggacacactctcccggggtctgcactgaggctgtcagggggcctgctgcgttccccactccaggtaaccctgtctgctggcactgagggcctcatcagacccctgcaggcctgcaaccacagccaaaatcagtgtgccttctccaaagccaccttctgacccgctttttaaagaaactgaggtaaggtttgcataatgtaaaattaagcattttaaagtgaacaattcagtggcattcaacacattcacaacgttgtacaaacatcatgcctacctagttcttgtacattctctctctctctctctctctctttttttgttttgagacagggtctcactccatcttccaggctggagtgcagtggtgcgatcttggctcaccgcaacctctgcctctcaggttcaagcaatcctcctgccttagcctcccgagtagctgggattacaggcatgcaccaccacacctggctaatttttaatttttcgtagagatgggggtctcactatgttgccaaggctggtcttgaactcctagcctcatgatcctcccacctcagtgtcctgtggagctgggactacaggcacgtaccaccccacccagctaatttttgttttacactaaagtgttatttcatcttggtcgctgaggttttttagcgcccccttcaattttgtgcccagtgtgaatacattgcttgcctgaccctggtcctgccctgggatttgggagccgacaggtccgggtaacaactgcagtttagccgctcacttgctggaggacctcaggctctcttccgtgagccttattttggccattgctggaatcccgttgtgcaggacagctgggtggattgcagtgatgtttgcgcaccacgtcccgagtgccagagcagacagggtcccacctgttaccgtcttggacttccagcctccagaaccaagagagagaagaaatctctgttgctaaagccctcctccagtctgtggcttgaggttacagagccccagcaaaccatcacgctgggttaaaggaactggtccccagagctcacagctgcagactggccaccgtaggacaatccagtgggacctgggggtgcctctgggccattgggggaccctcggtgagccagtgaactcagtgcacttctggagctccctgaccacgagtgaggaaattgaacggtacaggaaaagcaggagagcgtgcaccttaaacggccaaggtccgtcactaccaccgagcacctgccaggctccccacccagtgctcccaaaagtagagggccccctccctcccctaaactctcagaggttagtatcaccgggtcaagatgatgacagcacggggaagcctctggcaagggccttgccccaggggacagctcaggtggcctcggataacatgacaaagaccttctttatttattattattattaattttttattttttttggagacagggtctcaccctgtcgcccagactggagtgcagtggtgcaatcatggctcactgcagcctcagcctcctggactcaagcaatactcctgcctcagcctcccgagcagcttggactataggtgtgcactgccacacctggcttttttttttttaatttttatttatttattattacttttttaagacagagtcttgctctgtcgcccaggctggagtgtagtggtgtgatcctgggtcattgcaacctctgcctcctgggttcaagcgattctcctgcctcagcctcctgagtagctgggattacaggcaactgccaccacgctcagctaatttttgtgttttcagtagagacggggtttcaccatgttggccaggctgatctcaaactcctgacctcaggtgatccacccgcctcgcaaagtggtgggattacaggcatgagctatcacgcccggccactaatttttttattttttagtagagacggggtcttgctgtcttgtccaggctggtctcaaactcctgggcttaagcgatcctcccgcctcagcctcccaaagtgctgggattgcaggcacaagagaccctcttttattgttgcaagatgctgacaggtttcagaagaggtttgaaccaaagcggcctcagggacccaggtggcccctgggatacgtttctcccaggccaggtttggtttcagtcggcctgagcgtgcagacacctgtctcctgggcactaaacttgacactttcagttcctatcaggcggtggggacgagggggcgggtgggagggggggaacgggctcacgtgccaggctcggggggggggaagcgtcctcaacattctcagaaaggaccacgcccggcaccggccttggatggcttccctctcgcaatctgctttctgggaagtgggcccctcgcaccgggtgcggcgcccagggttccccgccaccccgacccttactaagccgctcagcccagggatccagggccctggcgagacagcctgggagacgcagagtgggaaatgatgactgggagctggtatcgcgaatgtctacacgcagactgacttcaggggcgaggaattccgcctggcgagcgtctagactgcggtgtttctgggacgctgggagctggagccaggacaggtctcccgggagctggtctgtgctgccacctgctggtcatggcccgacaggcggcctcgctgtcaccactgagtgagctcgaggtgccccgtcccaggaccgtggcaggagggggtcccgtcctgcgtggggcttgaaggcaggtgggcaagacggtgcatagcccgaatctatttaatgatttatttgataataccatttaaaaatatctcttaggccgggtgcaatggctcacgcctgtaatcccagcacttggagaggccaaggtgggaggataacttgggctcagaaggtcgagaccagcctggccaagagagcaacaccaggtctctacaaaaaattaaaaattagccgggcatgctggcgggcgcctgtaatcccatctactcaggagaccgaggcaggagaatcgctcgaaccggggaggtggaggctgcactgagcgttgatcgcgccactgctctccagcctgggcgacagagggagattctgtctctaaaaaaataaaaagtaaaagtaaaagtaaataaaaataaaaatcttttttttttttgagatggagtctcgctctgtcaccaggctgaagtgcagtagtgtgatctcagctcactgcaacctccgcctcccgagtttaagcgattctcctgcttcagcctccccaagtagctggaactacaggcacccgccaccacgcccagctaattttagtatttttagtagagaccgggtttcaccatgttggccaggatggtctcgatctctcaacctcgtgatccgcctaccctggcctcccaaagtgctgggactacaggtgtgagccagcgcgcccggccaaatctttctttctttttaataattggattgactttggtctacggtctcccctggggccccatccttctctggggtggggccatcctgggcactgcagggtgctcagcagcatctctgacctccgcccactccatgccaggagcatcccagttgtgataaccacacgtccccaaacatcgcccagtgccccctggggggcagcatcacccacatttaaaaacagttccagggtagcagcctgcaaagaaggtgtgtctgggacctgggcatttcatatcggggtgacccagcctgggagaggggaggggcctcagtgagaagactgaagccaggaccccccccaggcaggacccaggctcccacggcacaaaagccccaggtccagggttcctggaaatgttttaaaatccagtcgacaaaagatgaataaaatacttgtgagtgtataatcatgaatccagcctggattctgtttgtctttatgccaagacaattgtaaaatacagcttagaatttttttttttttttgagaaattttttttttttttttgagagtcttgctgtgtcgcccaggcagcggtgcgatctcggctcgctgcaacttccacctcccagttcaagcaattctcctgcctgagcctcctgggtagctgggactacaggtacccaccaccacacccggctaattttgtatttttagtagagacgggttttcaccatgttggccaggatggtctcgaactcctgacctcaggtgatccgtccgcctcggcctcccaaagtgttgagattacagatgtgaacaacggtgcctggccaacgtcggacatttttagagcggaggaggtagcctaggagggcaaatgtgccccaggccctgagtgtcccaacatggccctgcagccaggtagaaccagccagggaaagggatggtgtttaagggacgtggaaaaggaattcagacaaagaatttctgatgcaagtttaacccggctggtggctgcagcctacttcctgctacaggctgcacagtctcttgctgaattagcacctacgttgaattaggtgagtttgcttgaactatacgttgaattaggtgttgaattaacacataggggggctttgggctctcagcccctcatctaaagtccattgtctcaagccactgcctcattggaagagcaggtgtctacactacctggagagggggagatcctgcattaattatttggggagaatgcaatctgtccccgctcctgctcacagtagatacaagaataaactcccgacggggcagatggcataaaccagggggacccccagctcctgggactcttcctcctctctccctccccactcagggtgtggatttcaatgtgtgcagcctcctgggacctcagtaggagagatggtcacggaatgcagagtctcttggggaatctgtggattcccctaacctgggcggggggtctcaatcaggggtgatcctgcccccaggggacactgggcaatgtctggggacatttgtggttgtcatgcctggaggtgctcccggcatggagtgggtggaggccaggacgccactcagcaccctgcagtgcccaggatggccagaccccagaggatctagccccagatgtccacagtacctagcaggagagatcctgatttaattaattggtgagggggaagatcaagggaccctggctatgccaagaaactcggactgcagcagtgtgtggatcctgaatgagaaaggtgcgaatcagacagaagctcgcagcctaaggccagcgaaggccacggccacagcgacatctaaaggccggcaagtgcaatgcagaatccacccagggaactcgggccccgcgcctacccccggggtaaagggggccagcctcgcacaggtgggtccgttgcaggcgtctgttgcgagaccacatcctcaccacccggtgaacggcactgggagcagactcaagaggctcgagaggtcccaggagggcgggaagagagttcccccagctacagcctgagcatggtcgccagaaagcaggtgcggcgactttccctagcaccctctccctgccctctgtgtacccgcaggggggccctgcacgtcgggtctcaggcacatgtgtggtgaaatgcacacaacaaaaaagctccctttccagacatccagtggcattcgtgcagccatcatctctagctagctctagaacattctcagccccccaaaaagacaccccatccctatcagctgtcacttcccatccccctccccagcccctggcacccacacatccccttcctgcctctctagactggcctgtcctggacatttcatagaaataggatgacacactgtgtggccttttggatctggcatctctcactgagtgtgacatcctcaaggggcatccaggctgcacgtggcctgggtcagagtctcgttcacggctgagtctcgttccagtgtgtggagggccacgctgtttatctatttacccacggacggacacttgggtcatttccaccttttagccattgtgaatcgtactgtatgaacatttgtggcaaggttctatttgaacacctgcttccaattcctctgggcagataactaggagcggaattgctgggtcatgtggcgactccgcgttcagccttttgaggaaccaccagactggtttccaaggcggctgccccatcttgcatcacacatcaattctcaatgccaaggcgttcctcagcttttaaacaaggcactgaggcaggaggcaggcagctgattgttgaaggtcaccccgtagccattggcagagccagaacttgcagctgtgatttgtgccgcggctcctgcccaagccctccttccctggcttcagtgctgggctgggcaaggtgtgtggaatagccccgctttctaggccactttcggggtactgggcggccactgtctggtctgaaggtgccatctgtgacactcttttttttttttttgagacggagtctcgctctgtcgcccaggctggagtgcagtggcgcgatctcggctcactgcaaactccacctcccaggttcccaccattcaggctcccccagacctccgcctccagggagccctccagaatgtccttcctcctgccttcaatgctcctccccatcctgcaggggtcggcaaggatgtcctctccttagagaccttcctggacaccacgtggcacagactctgtcctcttggtgccacctcatcctattttctttgtcttttccggttttttttttttttttttttttttttgagatagggtcttgctctgttgcccaggctggagtgcagtggtgcagtcacagctcactgcaacctcagcctcctgggctcaagtgatcctcctgcctcagcctccagagtagctggaactacaggcacccaccaccacgcctggctaatttttttgtatttttagtagacatggggtttcaccatgttagccaggatggtctcgatgtcctgacctcatgatctgcccgcctcggcctcccaaagtgctgggattacaggcatgagccaccacgcctggcccatctgtgagattctgaagagccactgctgagcaattaagctgccctctgcagtgggaaattttctttgcaaggaagcagcaaggcggaggaggcaggagggttccctaagattgtgcacccacggcagccagcaatgtgcctgacacagtgaagggcctcggcaaaggggcgcctcctgtccccttcaaatccttacgggccaccccaggatctggtgacctggaacagactcctgtatgggcctttttcccctggtgccagcagggaacagggcaggatggaaaaaacacccagtagccagtggcccactgatgtcaccaagctgcagggctgcccagcattgattaaacacagctggtgtgggccaggcatggcacctcacacctgtgatcccagtgctttgggaggctgaggcgagaggatcccttgagctcaggagttcaaaaccagcctgggcaaaatagtgagaccccatctctaatttattattattattttgagccggagtctcgctctgctgcccaggctggagtgcaatggcacgatctcgactcattgcaacctctgcctcccgtgttccagcgattctcctgcctcagcctcccgagtagctgggattacaggcgtgtgccaccgtgcccagctaatttttgtatttttagtagagatgaggttttgtcatgttagccaggctagagactccatctctattaaaaaacaaacaaagaaaggctgggtgtggtggctcatgcctataatcccagcactttgggaggccaaagcgagcggatcacctcaggtcaggagtttgagaccagcctgaccaacagggagaaaccccgtctctcctaaaaatacaaaattagccgggcatggtggcgggtgcctgtaatcccagctactcaggaggctgaggcagaattgcttgaacccgggaggcagaggttgcaggttgcagtgagccgagatcacgccatcgcactccagcctgagcaaaaccccatctcaaaaaaaaaaaccagacaaatatagctggtgggttcttgggcaaggctggtgaccagggccctaggggaggatgtttccaagagctgccaagagcagtggggcccgggttctgcccgcctcttcctctgactgtttcctcatctggggtcacgggataagtgcagctccgcctccctggtcatgcaggtgactgtgaatgaaagtgtcttggaatcagaaggttctggcatgaaagctttgcaccagccttccaccagtgtgctgcccagcacgtgactatcggaaaaactttagcttatttcagcctaattacattccgttaacccaaagtctctgacgttcagggctggatcattctctgggatggggccatcctggtgcactgcagggtgctgagtggcgtccctgacccccacccactccatgccaggagcatctccagtcgtgacaaccacagatgtccccagatatcacccagagtcccctggaggcaaacctgtcccacttaagaaccgctggcctggaccagaaactggatctttcagggaggcagagctcaccagccatccaggcactgagcccggcccagccctgcagctctgaccctgccttgggctgtgagctctgaggaccccatcaatctgatcaagaagccacactaggtcacctcagaccaaggacattctgccatgatgcttcagactgttcttctccccatcctcctctccacctccagccctcaaagacctggcctgggtcccctcccgtggctcccagacctccgcttccagggagccctccggaatgtccttcctcctgccttcaatgctcctccccatcctgcaggggttggcaaggatgtcccctccttagagaccttcctggacaccacgtggcacagactctctcctcttggtgccacctcatcctattttgtcttttcctttttattttttttttttttgagatagggtcttgctctgttgcccaggctggagtgcagtggtgcagtcacagctcaccgcaacctcagcctcctgggctcaagtgatcctcctacctcagcctccagagcagctggaactacaggtgtgcaccaccatgcccggctaattttttaaatgttttgtagagatacggtcctgctatgttgcccaggctggtctcaaactcctggcctcaagtgatcctcccacctcggcctcccaaagcgctgagattacaggcgtgactatttccttatcttctaagaccctctgtttggtttgccagtgtgtctgggcatgtgctgtctctgtgtgacacatgctccctgagaacaggacttgattccacctgtatcaggctgggcccccagcacctaggctgtccctggcacacagtgagtgtcgggtcaatatttgcgactgaccgacgggttggccttccatctactcttccactcaccagcttctccatcttgcccaaatccctgccaaccccagggcactgaggacacagattactcctcacccatgccccttgcaaagctctcagccacatttttctcttttctacctgtatgtgtgtggtgtgtgtgtgtgtgtgtgtgtgtgtgtgtgtatctcactctgttgcccaggctggagtgcagtggtgcaacctcagctcactgcaacctgcacctcccctgttcaagcgattctcctgcctcagcctcccaagtagctgggattacaggcacgtgccaccacacccacctaatttttgtattttcagtggagacggggtttcgccatgttgtccaggctggtctcgaactcctgacctcaaatgatccacccgcctcggcctcccaaagtgctgggattacagacgtgagccaccgtgcccagcctgttctattttttttttaataaacaattttatttggagtaattttagatttacaggaaagttgcaaagagagagtccccgcccacgcctcaccagcttcctcttcaggggccaccctgtgtaaccacagggcattgctcacagctggggaacgctggcaccttcctagtaaccaaatgccacagcgattcagcttccctcagttttcccctcacgacctttcctgccccattgtgaccccatccaggagcccatgtggcatctgaccgtcccatctccgtgggttcctctgggctctcagtttcttggtctttctttggtatttccatgaacttttttgtttgtctctttaagaaaacggttactatccatgaaaaacaaacaaacaaaaaatgtcattctggctaccctgagagcttataattgctattttaaaatgaatgaatacctatttgattgacattttctcagttttgatttcaaattcaacaaatatccgtaagtagaaggcatataaacaaaagctccttggaataatcgtcaggaccagagagtttgagaacctttgtcctaagccaggggttagctaactacggcccctggaccacatctagctgactgtgtgtttttgtaaataaagttttattggcacacggccacacccacttgttgacatattgcttgtggtggctttcccgctacaatggcaggcagagactgtccagcctgcaaaggctaaaacatttgccatctggatctctgcagaaaagtttgctaccccaggcctcgcacatagtaagttcatagcaagtatttgtttatagtaaggctgagccctaatcagggtgaagggcaaggtcagacatcggaggaccactgaaatgtccattctgtcccacctggtacagcaaacgccaccatggagcaggactcagccatgaaaaggaacaaggctctgatgccggccacagtgtggatggaccttgaggacatcacactctatgaaaggagccagagacagagggccacgcagtgtgtgatcccatttctacgaaatgtccaggacaggcccatccatggggacagggaggggatgcgtgtgtggcagggctgccggggggagatggggagtgactgctcatgggggacagggcttcttttgggggtgataggatgttccggaattagataaaggagatggttgcacaactctgtgaatgtaaaaaccgctgagctgcacatttttaaagggtgagttttacgctgtgtcagttatatctcaataaagctaatcctagcattttgggaggacgaggggggggcgcggatcacctgaggtcgggagttcaagaccagcctgaccaacataaagaaaccccgtctctactaaaaatacaaaattagccaggcatggtggtgcgcgcctgtattcgcagctacttgggaggctgaggcaggagaattgcttgaacccgggaggtagaggttgcaggttgcagtgagccgagatcgcgccatagcactccagcctgggcaacaagagcaaaactctgtctcaaaaacagaaaagaaaagaggagaggggaggggaggggaggggaggggaggggaggggagaggagaggaccctgtagaatgaaagaaaggcagatccccctgcaccctggctacaggccgtcgtcccgacccctctctctgcaggcaggtcactgcccccctcacaaacctctgtcctgatcccccaacccacacaccagagctgggcccatgcaccgggaaacctgccaccccaggggccactccagtctcagaccaacaggatattaaaaaaggcgaaacctcagaaccgtttcctatcgaaaccaattagaaagctcttgggtatgagtccaatgttttcaagcaactaaaggcaaaagagaagattttcaacgaaacatcccagctgggggtgagcttcttagggtcctgtcatcggccaccctagagggacctaggggtgagcttatgccgtcagcacccccagccaacgtgggtcggccagttagctgggcgtggtgttgtgcgcctgtaatcccagctacttgggaggttgaggcaggagaattgcttgaacccgggaagtggaggttgcagtgagccgaaatcgtgccattgcactctggctccgggcaacagagcaagacagctctgtgcagagaacagactcctgcggtggaaatgctggctgcctttgaggctgggttctgtgaccttgggtttcccagcctgagcttccagtttcatttataaaaggggtgacgtggccgccttcctgcaggcgctctgaaggtggcagattacacagaggtggtacgactcatacaggtttctgcaaacgggggccccatcaacagtcacctttccttagcacagcgccttcctcctggggtgacctcgccccttcctgcacaccccaggagcttcctgagacctgagtaaagctcacttcccttgcaaggggtttagtgacgtcccttcaaaattcttgtccacggggaacctcggaaaatgactgttacggactaattgcatttgcttaaaacttatgttgaagctggatgtggtggtccacacctgtggtcccagctactcgggaagctgaggcgggaggattgcttgagccctaggatttcagggctgcagtgagctatgatgctgccactgcactccagcctgtgcaacacagcagcaagactccagacacaaaaaattaattaaagaaaaatggctgggcacagtggctcactcctgtaatcccagcactttgggaggccgaggtgggcagatcacctgagataaggagttcgagaccagcctgaccaacatggacaaacctcatctctactaaaaacacaaagttagccgggcgtgttggtgcgcgcctgtaatcccagctactcgggaggctgaggcaggagaattgcttgaacctgggaggcagaggttgcagtgagccaagatggcaccactgcactccagcctgggtgacagagcaagacctcatctaaaacaaacaaacaaacaaacaaacaaaaacaaagaaggagacacagagagacagcagaaaacagaagcagagactggagcaattcgacggtaagcacaagccaggtttgccagagcccccagaagccagaggacgcggaaggatcctctcctgtagcgcccaggggagcacagctctgcagacagcttggtttagtacttctgccctccagaaccgtgagaggacacacgtctgcggattgatacttccgggtctgtggtcacctgttatggcagccacaagaggctcgtctgccccttttctctccccttccttcatgctgatcaccacggaggagtgagttcgattccctctgcctgcccaaaaccctcatcaactttttttttttttctctctcttttgagacggagtcttgctctgtcacccaggctggagtgcagtggcgagatctcggctcactgcaagctctgcctcccgggttcacgccattctcctgcctcagcctcctgagtagctgggactacaggcgcccgccaccacacccggctaattttttgtattttcagtagagacggggtttcaccatgttagccaggatggtctcgatctcctgaccttgtgatccgcctgtgtcggcctcccaaagtgctgggattacaggcatgagccaccgcgcccggctcctggtggtttttaagcttgcaaagggtgcgggataagccctgcagaagtcaatggtcagtaatgagggctggggattcagcccatctccagggaaagcccccgaaactggcaacaccagctgcttccgggaaggggaacccaatgcgagcaacgcggcagagagggggcttccgggaaggggaacccaacgcgagcaacgcggcagagaggggggcttccgggaaggggaacccaacgcgagcaacgcggcagagaggggggcttccgggaaggggaacccaacgcgagcaacgcggcagatagggggcttccgggaaggggaacccaatgcgagcaacgcggcagagagggaggcttccgggatggggaacccaatgcgagcaacgcggcagagagggaggcttccgggatggggaacccaatgcgagcaacgcggcagagagggggcttccgggaaagggagctcaatgcgagagcaacgtggcagagaggagggctttgttttcactttcaccgtgtatcatttataccactagagctctgacaccccgggcacggccactgatagaaaacattggtccttcttcctgggggtgtgtggccaagtgagggtgggtgagggagaagccactttccggctaaggtcctcaacacccaggctcagtctgagctcttctgtgtcccaggaggcaaaaaggtgaccacaggttgggctgtagtatcaaacccagaacaaacggggtgttccaagcctgggcaacatagccagaccccatctctacaaaaaaataattagccaggcgtggtggtgcacctgtagtcccagctactttggaggctgagatgggaggatcgcttgagcatgggcatttgaggctgcagtgagctgtgatcgtgccactgcactccagcctgggcaacagagcaagaccaggtctcaagaaaacaaataaacaaggtgttccttacccaaaggaattgcaaggaggggctcggacagatacttgtactgttcactcatgttcacagcacccaaaaggtggaagcaatcaatccaagcgtccatcaacagatggacagataaacagcatggtgcatctgtatgatggaatattactcagccatgaaaaggaagggaatcccaacacaggctgcaacacggatgcaccttgaggacgtcacgctcagtgagagaacccagacacaaaaaaccaaattggccaggtgtggtggctcacgcctttaatcccagcactttgggaggccaaggcaggtggatcacttgaggtcaggagttggagaccagcctgggcaatgtggtgaaaccccatctctactaaaaatacaaaaattagccgggcatagtggcaggtgcctgtaattccagctactcaggaggctgaagcaggagaattgcttgaatctgggaggcggaggttgcagtgagccgaggtcgcaccgctgcactccagcctgggccacagagcgagactgcatctaaaagaaaaggacaaatcttgtgtgactgcacgcctaggaggtccctagagccgtcagattcacagagacagtccatctgttgatggacgcttgagttgcttccaccttttggctgctgtgaacatgagcgaacagtacaagggaagcaggatggggggtgccaagggctgggaaggggacggggagcaagtgtttcacggggacagagattcagtctgggaagatggaaagttctggagatgacggtggtgatgggtgcagcaccatgcaaatgtgcttaatgccactgaactgagcccttagaaatggctaagatggtaaatactatgtttcatatattttaccacaattaaaaaaagaaagaaagggccgggcgcggtggctcacgcctgtaatcccagcactttgggaggccgaggtggaaggatcacgaggtcaggagatcgagaccatcctggctaacatggtgaaaccccgtctccaataaaaatacaaaaaaaattagccgggcgtggtggtgggcgcctgtagtcccagctactccggaggctgaggcaggagaatggcgagaacccgggaggcggagcttgcagtgagccgagattgtgccacttaactccagcctgggagacagcgagactccgtctcaaaaaaaaaaaaaaaaaagaaaaagaaaaaaagaaaagaaagaaagaaaggtgctccagtggctctcaggcagagctccacctctgtctggttgccggtggtgccacagcacagcaggcctctcgtctccggagcagtgactgtgacctgttgccagccctggcggctattcctagcagctcctgacctgcaggaggctgagcccagcagtgccttctgggaaggagggaaggagggaggctttctggtaattacccccaggcagagggcaggcgggcacaggggcccgagcccctccagcccatcccacaggctccagggtgtttactgagcttgcagaattccacgctgtgggctgggccactcctgccctgagacaggaagacaaggtcagctcagggcacagaagccatctcctggctgtcacctttccttgtgggtgcagagccggaccccaggcaggggtggacgcctgtggtttacctccctgggggctcgggccctgtgccgagggtgcatgtgttgtcccctggggcctctagacctcttcctttcttttgagacaagatcttgctctgtcgccaggctggagtgcagtggtgcgatctcagctcactgcaacctccgcctcccgggttcaagcaatcctcctgcctcagcctcccgaatagctgggaatacaggtgcacaccactgcacccggctaatttttaaaaatttttttgtagacaagggggtctcactcttttactgagcctggtcctgaatcctggcctcaagcaattctctcacttcagcaccccaaagcactgggattataggtgtgagccactgtgcccagccagggtttttatttttattttttgcagaaatagaggggggtctctgttgcccaggctggtctcaaactcccggcctcaagcgatcttcccatgtcggcctctgaaagtgctgggattacaggcgtgagccactgctcccagattagccagacttctctcttctcctcggtcacggggatcaggaagcagagaaccaaggttctgccaccaacttgtagaagggccatgggtcacccatgcccctcccagtgtttccatggttgccagggaagccagtgaagggcagagtctttggggaggaggaagctgggtcagagaggagatgagggtgtgagagggtgagcaggtagcgccctcaccgtgctgggcacaagacaaggacttcagagctgattattttggttttggggttttttgtttgtttttgtttttgttttgtttttgaggcggagtctcactctgtcgcccaggctggactgctcactgatgctcaccgcaactccgcctcccgggttcaagcgattctcctgcctcagcctcccaagtagctaggattacaggcgcccaccaccacgcctggctaatttttgtatttttagtagagatggggtttcactatgttggccaggctggtctcgaactcctgacctcaggtgatccacccgcctcggcctcccaaagtgctgggatgacaggcgtgagccatggcgcccggcctgattatttcatttactccctgcagcaaccctggactgcaggggtggtgatcaccccccattttaccaaacagaagcagagagtgaccgcgggtgcccacctgaccccgtgtctccagcgggaacgtgaagctgatgctgctcccgccccaggcctgaagccggccccctgccccaaaccagcctgaccagcggcaccgtggaaacccaccgggatctctgccacccacaggaggctggggcatctctcaccccctctgtgcctcagtttcctaatctgtcacacagggaggctggacccaaaccaattgattgttgtcatgggtggagccggaacccgctatggctccctcctgccctcgggataaaatgcagcctctgccgtgcggcctcctcactccctccctctcaccttttcaaggtcctggaaccatctctgcacctgtatcccccaccccacctgtcaccttcagggcactagcaacactcaactcatgtcacttcctccaggaagccctccctgaattcccgaacaaagctcctggtgtgggcacctgctttcactcttgggcggtgttgtcttcatcggttcactcaatcagggtctcaactggggtaattctgtcccctcaggggacactgggcggtgtcgggggacatctgtaattgtcatgacggagggaagtgggaccttccctgactaatattccctcacatcggtccatgctcctggcatggagtgggtggaggccagggatgctgctcagcaccctgcagtgcccaggacggcctcaccccagagaacagtccagtgtcagtgtccacagtgcccagggggagagacctgctttaattatttgggaataaactgagtgtcctccctactcacaccagacactggaataaactccagatggagcagacggcataaacccgggagccccagctcctgggactcatctcctctctctcttcccactcaggtgtggatttcaatgtgtgcagcctcctgggacctccgcagggcagaggatcatgggatgcagaatctcttggggtctgtggaatcttctatcccagagggtctcaaccaaggtgtttctgtcccaggggacgctgggtgatgtctggggatatttgtggttgtcatgactgggggtgctcctggcatggagttggtggaggccagggacactgtcagcaccctgcagtgcccaggatgacccaccccagagaacgatccacctcacatgttaaatggcggtaagggggtgaacccaccccctgcatggctccaggggcacccagagtggggccccagccctgtggccgcctctcctcccacttcctccgggcgcctgtcctctgcacctgcatcctctggccctggctcccttcagagctggtcacagctggcagcccgcgtgctgtaaacacccacccaggcgtgccagccagacctggctttctgtcactcccggctgattctgaattcccagtctcacatgggccagagggtgactggctcgagacttgcctctcattacgagcaaagctctgattcagccggaatattagtcagggtacagcatgtcacattccaggaggctgatcagctccgacctcaacaccggcagctgactcagcccggggagttgcatgtgctgactactccttctgagcctcacagttatgttctcgagatttcactcagtgtcctatggtgtcactggtcctggtcgcagacacagactcacctgtgtgcaggaggtcaggtgaggatcggtcccagcaccttcattctttgtttctttcactcactcagtaaacatctggtgaagacttggaccagatccctgatcttaatgaaggaggtgacggtccggcccaggtgacaggcacagttaatgtgatgatcacaacacagttgccatgtgaccctgggcacgtcagcccctctcagctactgttttctcctatgtgaagtggagatcattatctcaatctcaacatggcaaacaacacggcaagtgtatgagtcagctactgctgagtaacaacagcggcaacaaagacaccatttgccatctcacaacttctgtgtgtcaagagtctggcttaactgggtcccccgctcagagtcttataagcctaaaatcaaggtatgggctgggccgagttgtcatctggaatttggggtcctcttctgagctagtttggttatcggcagaattcatttccttgcagctctaggaatgaggtccctgtttacctactggctgttggatgtgagtgctctgagcccctagaggctactctcaggtgtctgccacatggaccctccacaggcagctcacgacatagctgtttgctttctttaaggcaagaaaccccttccctttctctctttctttcaactgtggtgtgtgtgtgtgtgtgtatatatatatataacataagacggatcatcttaaccacgtttatgtgtacggttcagtgatgttaagtatactcacactgctgtgcaatggctctccagaaccttccatcttgtaaaactgagacactgtatccactgaacaacagctcccctcttccctcccccagcccctagcacccaccattctcccttctgtctctctgaatttgacacctcgggatgtgcttctggtctcttttatgggctcacctgatgaggtcaggcccacccaggatgtctcctttttgatgagctcaggtcaactgactaggaatcttcgtcgcatctgcaaaatccctttaccgaacacacgacctaactgcattaacctaaccactggagtgacaccccatcgtattcgcaggtccagcccatcctcaagtgcaggggattagataagatgtgggcaccaggcggtgggggtcttgggcgccatcttggaattctgcctaggactgtagctgtaaaagacatggtggccattgctgctgtaggtgccattagtaggaaacacacacaaagtggcccccaaggagcacgtactatgcatcaggctctgtgcaaggcacagagaaaacagcaaagaactttggggaaagttgaagacttgaggtgaacaactggatatcttagtaggtctctctgaaggttgagcaaatggataggggatattgggagatgggttatgtcccttggaaagaactccaaatgtccctttcaataactttccactctaccagtcatctcctccttccagaaattctcaggaggcagcgcttggtggctcttctgcagatgccaggatggtgacggtgacagcaggccacgctcttgtgtttagaataggaggtccccaaggacacagagtcacagacgggtcaggtaagttgcctgggcgcccacacgaataggaggtgcttctggatttgaaacaagtcttctagtgctaggagccccagaacacacctagtgccaccccctccccacgacaaagcccaccagaagggctggctgcctaaagaggtagtggacaagacctcacagactcacagactagtgggagaagacagaagagcgtagccctgaacgcagtgtgggggcacacggtgattggaacctggcacccacatcaacggtcaaagtctagatggttttgtttggttgtactcccgcctccctctgaccccatgcccacgagtaagaggagctccgtccacatttatggacacttaatgttcctgcacacccataaataaggtgaagccgagtctgcatgtgtgcgaaagggcacagagctttgcacatacatggtgccagggtccatttcctggttttgtactatggttacgtaagatgtcaccactgggggaaactgtgaagatacatgtgatgttttttgctctgtgtgatttttgcaacttcctctgaatctgtaatgatttcaaaataaaggttgttttttttttttaataagtggagacacatttaggtgtaactgggacacagcctgccacctactttccaaatgcctcctttctcccaataacccccaccctctccccaaagacctggcagtactcctgcaagaggaagggatggacgccagaaaaagggagtgaaggtcctgctgattcggtcctggctgaggccgaacgcaggcccccccttccctttgccaccaagaggagtctaagatctccctggagaacatatcttgtagaaccccctccccttgagtgtgggcagggcccgtggacatgatgagatatcactcccctgattaggttgcttttcaggaaagaagggattttgaagaggtaaataaggtcctaaatcagttgaccttgagttcactgaaagggcgattatcctaggtgggcctggtctaatcaggtgaccctttaaaagggattgggcctttcctgaaatgagagcctggaagcatgaggggcctatggagaaggccaagtggcctgagagtggcctcaaagagctgagagttgccccctcctgacagctaacaacgcaacagaaacagtctatcaaccacaaagaactgaattctgaatgagcctggaatgagcttggaaggggatccgtcaccacacaaaccttcggatgagaatgcagccctggctcacatctccgaggtcagaagtttggacatagtgtggctgggtcctctgtgcagggtcttacccagccacactacatccaaacttctgacctatggaaccatgagataataaatgggtgtcactctaagctactgcattcatggtagttgttacgcagccatagctagctaatacactctttatgtgctgcagactagagcattctgggattttatggtcagctttcaaacttattcatacacaagggtttggacatcatgtccctccacaatcagccaagcaactcagcagtttcctcctgagtatgtctgagtatatcatcaaaaaggtctaatgactatgacattatctgattgtctcaacagcactgtgtggggctgaggaggcatagcaggcatgaagaccagaggaagaatggtgcatttagtattagacagcttgacatgcattaaccccttgagaggcaggcactgcctattctcccccctttcacagacgagggcattgaggttcagaaaagcacagagatggcccagggtcacagagccagtaggtggcagagttgggagcccaagccctaaactgctggttatgtcacctcatgaagccacttaacctcgctaggtctcagcatccttatctgtccagtgacgatcattctttcctcacgagtggttatgagatgaaatcagataactcaaggcctctaggctgagggtcagcaaaccttttctgcaaaaggccactgagctctgtccttgtagtatgaaagcagtcactgatgacaggtaaatgaatgtctgtggccgtgtgccaataaaactttattcataaaaacaggaagtggaacagagaacttggcccagggacctgcagtatgtctgtggctgtgtgccaataaaactttatttatacaaacagggagtggaggggggaacttggcccagggagctgcagtttgtctgtggctgtgtgccaataaaacttcatttataaaaacaggaagtggagggccagactgggcctggggtgggggcacagcatgtctgtggctgtatgccaataaaactttatttataaaaacaggaactagatgggggacttggcctgggggccacagttttcgaccccggctttagcagttttttccttcttttgctaacttctaaaatgaagccgactgaccctagaagtgccatttctgaaagaggaagagagaaaaggggtgaaaggacgttgaaccagccaaggcagactacagcattttcagggcgtctccccaagatctccaataaggacaactagcatcgactaggctaatcccgtgacggcctgttctgcggggacatcatcaccctggtgctgccctctcccccattctctagagaaaggagccccaaaagaacagataaactctgcctcctagaaaggtaagactcctggcctggcgctgtgtgggatcatgcctgtaatcccagcactttgggaggcagaggcaggtggatcacttgaggtcaggagttcgagaccagcctgaccaacatggtgaaacccgtctctactaaaaatacaaaaattagccaggcgtggtgtcaggcacctgtaatcccagctacttgggaggctgaggcaggagaattgcttgaacccgggaggtggaggttgcagtgagccgagattatgctattgcattctagcctgggagacaagagtgaaactccatctcaaaaaaaaaaaaaacaaaaaaacccaacctgctataaacaaaactcacacacacacacacacacacacacacacacacacacgcacacagaaaacagactgggaattgtaaaaacagctgacgaacagagactttctactctacagggaagtctctcaccgtcagcactgtggacatcgggactggatccatctctggggtgaggctgccctggcactgcagggtgctgagcagagtccctggcctccacccactccctgccaggagcaccccttagttacactgagctatgatcgcaccactgcactcgcacctgggcaacagagtgagactctgactctaaaataataataataacaagaatataagaataataattcagatccatgtccgataaaaataataaataagtaaagctgaggctctaacatgaagtcattacgaggctcatccagccacagtgggctctgcactggggcacccgcctgggcctctgcctggcccatgtctgctcaggagccctcagccccttgaaccctgctggtgggacagggggcccctctaccaggcccctaacttctcaacagaccccaccttgggcctccccaggctgcaccttaaccatctatgacacgcatccccaggcggcaccgggagtgtctgcgcagagatccgagggtgttagcctggcaggggccctgcaggtgggtgctggttcactaaaacgatgaagcggatgggaggaaaattagcatccaacgggcctcatcattgctgtcctgggcaatggactctgacccctgctgtagagggtcagagagggtcaaggtcaagccacagattggcagagccatcctctctggcctccactcggctcccccatgtcccctgcccccagcatctcatcatatgcgactgtcaccgccgtgtgtattttgagtcaaaggcggccaaggctcgatgaatctgccgatgaccaagttggtgcctcatccctcgttctgtgggaggctgactgttcaagcggttgcttagcaacaggcgcgcgcgcgcgcgcgcacacacacacacacacacacacacacacacacacacgagaggtggctgtggtctgcacactgggctggggtactcagatccccgggctcggtggtcgtggatgtgagcctctctgggtatggagcctcaatcagtagagtcaggtggtcgcaataacagctctgaaacggggattcattgagaggacatcggtgggcttgaaaacgggtgtctgtttaccggggcttgagtgggagctgtagtaattctgtccagaagaggacagaagcctgctctcaactcacccgggaggcaggttcttctgcaccgggccttctccccccggcactgtgggcatttggggctgaatcattcttggttgtggggctgccccgggcactgcagggtgctgagtggcacccctgacctccaccccatggcatccaccaatcgaggcagccacaaatgtctcctgggtgcaaaattgccccgagttgagaccccctgggataggggattccacggacccccaagagactccgcgtcccatgatcctctgccctgctgaggtccccggaggctgcacacattgaaatccacaccctgagtgaggagggagagaggaggtgagtcccaggagctgggggtcctcctggtttacaccgtctgccccactgggcgtttatggtgcctatcatgagcaggaaaataactcgaatttttttccccaaaataatgaacccagagtttctccccctcagcactgtggacatttgaggcccgattgttctctggggtggggccgtcctgggcactgcggggtgctgagcagtatccctggcctccacccactccatgccaggagctcccccaagtcgcgaaaaccacagatgtcccagaaattgctcagtgtccccggggttgggggtggggggcggcatcacccagatgacccctgctatagagggtcaaggtcatgtccaagctctcctaccgccgggaagcactgccttgtcctgggctacagatgtggaggctgctgggtacagggagaggtttctgagtcctggagactgtggcagagcccctgatttcggcacagcgccccgtaattacttgcgggctgcacacacgttttctctcggggagggtggtagcaatgagctgtgaccttccgggagcagagcgttttcaggctctggctgtatatcttggcaattctttcaggggaacaacttgtccgcgaaaagaactgataataacgtgaatttcaacacgaccaggacatgctgaaatctggtgaccgaccagggggaaataaacccgctctgactggccgcggggactggagtttgcttaccacacaagagcccttctcaggataagaggctccagtaaagctctcagcagaaatgttaccaaaaaaaaaaaaccctcgccgggagaacaaggagctaccagaaaaacacactcggtgatctggaggtcgcaaagttcttccgcactcagtgaggcaagaagcaaaaaggctgaagaaatgcttatcctggaagaggggttctcacccgggttctgtggacatcggagccggattgttctctggggtggggtcgtcctgggcactgcaggctgctgagcagcgtcccgggcctccacccactccatgccaggggcaccccccagtcgtgtaaccacaaatatccccagacattgccccagatgagtgaggacagaggtgcaggtgggtgcaggtgggcacaggtgggtgcaggtgccccgtgaacccatctccatctgcaccctctgcatctccaaccccacccccagccccagtgtctcctaaggggtagaaagtcttcagtgctgaatgtgagagaccctgccttaatttgagggaaaaaaaagtaatcaagtctgtcccctgctcacatcagacaccacgacaaactcccaatggagcagacggtgtaagacagggggaccccagctcctgggatttgcctcttctctccctcctcactcggagtgtggatttcagtgtgtgcagcctcctggaacctcagaggtccatatgatcatgggacacacctgagacccaggaggtctcaacttggggtgattttttttttttttgagacggagtctcgctgtattgcccaggctgtagtgcaatggtgcaatctcggctcactgcaacctctgcctcccaggttcaattgattctcctgcctcagcctacggagtagctgggattgcaggcgcccgccaccacacccagctaatttttgtatttttagtacagaggagttttcaccatgttggccaggatggtctcgaactcctgacctcaagtgatccgcccacctcagcctcccaaagtgctgggattacaggtgtgagccaccgtgcctggccaacttggggtgattctgtcccctaagggacactgagtgatatttggggacatttgtggttgtcacaactggcgggtgcacctggcatggagtgggtggaggcccgggacgctgctcagcagcctgcagtgcccaggacagccccaccccagagaaaaatgtggccccaatgtctacaggagccagggggagagagaccctgtgttatttggaaaaaaacagagtctgctctctgctcacaccggacaccagaataaactcccaaaggggcagacagcataaatcagggtaactccagctcctgggattcacctcctctctccctcccactcagggggtggatggaattctcctctggccaaactgaaccagctctctactgccttcactcaggggcgcacgagtctctaactcacaggcgaggatccaggccctctgcccgccaggacaatgacccctctctgagctggggagtggcagccccaggtccacagccagttctcaccctgaggagcatgacatctgggaggggggatgacaggcaccccagggcctgatggtggggacaagccagggtctgattcccatggcaggatgacctgcactctcccagggccacccagccctccagggatgctttatgccttccattctctggtccgagctctgctctggagacacctctgtgcccgagtgtgaggtgcattccctgactgccttaaggccactcctggggagcagagccagtgcctcccgcctcctgccacgcacaacacccagggaccgcctctggttttgggcagagaggctctgagtgtgcccacaggggcccctagggcaggggccaaccatctgggtttgcctgggacttagggctgtcagtgttgaaccaggaaggtatcaagcaaactgcagtgggggtagtgacagagcttaaagaggggctcgggggtgactgaagacatctgggatacagtcagtatgcactgcctgcacctccatccccacctgcacccacctgaacccaactacgcacacctgcgcccatctgcacctccgtccccacttgtgcccacctgcgcccacctgcacttccgtccccacctgcacctctgtccccacctgcacctccaactccacttgtcctcacctgcacccacctgcacacccactgcacccccgtccctacctgcaccccccgcatctccagccccctgccggctccaggcccggggccaggaaactccgtgggcctcctctgccccctcgtggccgccagcggtaacagcagccctctgcaaatcgagcttcagaggccccaggaacaggctccccccgcccccgagcccggcccgtctttgctgttgtcgttgttgttttgccctggggcctgcagaaggataggagcaggggatcacggtgctggttttgtcatcaggacaggcagccacggccctcacttggcggcgcacctgctctcctggagaggctgccacccagaggtcagagacccccgcaggcgcctgcacccctcacagcctcgctctcctccccgtccgtccttgtagggaggtgagtttccaagcttcccaccctgtgcccgcaggagccaaagccgcactcgcccagcccagcgcccagcaaacaggaggtgctcaatgaatgactagcaacattattaaaagatcaggaaaagcccgcatcccacgccaccctttgtaacagagaaccccttcaaggtcagccggcaccacacctgctcaccactaattccgtcccctctactggggcctccccttgcgtgtgtggacatcagagcctgatgattctctggggtggggccgtcctgggcaccatagggtgctgagcagcgtccctggcctccatccactccatgccaggagcatccctccatcatgacaattacagatgtcccctggaggcagaatcacccctggttgagaccccccgggttaggggattccacggacccccaagagactccgcgtcccatgatcctctgccatgctgaggtcccaggaggctgcacacattgaaatccacaccctgagttgggagggagagaggagatgaatcccaggagctgggggtccccctgatttacaccatctgccccatcgggagtttattctggtgtccagtgtgagcagggactgaagtcagttttgaaataatgaatgggccgggtgcggtggctcacgcctgtcaccccagcactttgggaggccgaggcaggtggatcacgaggtcaggagttcaagaccagcctggctaacatggtgaaaccctgtctctactaaatatacaaaagttagccgggcgtggtggcatgcacctgtaatcccagctactcgggaggccgaggcagagaattacttgagcctgggaggcagaggttgcagtgagctgagatcatgccactgcactccagcctgggtgacagagcgagactctgtcagaaagagaaaagaaaagaaaaggggaagagaaggggatgggaagggaaagggggaggggaaggggaaggaggggaaggggagggggaggggagggggagggaaaggggaggggaaggggaggggaaggggaggggaggggaatggaaggggaggggaggggaagggaagagggaggggaggagaagggaagggggaggggaggggaagggaagggagaaagaaagagtctctccctcctgggcactgtagacattggggctggatgattctcttggatggggccatgttgagcagtgtccctgacctccaaccactcatgccaggagcaccccccagtcgtgacaaccagagacatccctagacatctcccagcatcccctggggaggggaggggaggggagggttgggtcagaatcacccctgcttcctccgtgagccccactagcatagttaaatttcaagtagttcagaatttaagtgtaaaacatgcaatcggaacaaaatacaggtgatttttttataatcttaaaatttggaagagatccataaaaaaaacaaaggagatgctcatgtataacaaacatttaaaatcctggccaggtgcggtggctcacacctgtatcccagcattttgggaggctgaggcagaaggatcacttgaggtcaggggttcgacaccagcctggccaacatggtgaaaccccatctctactaaaaatacaaaaattagctgggcatggtggcgaacacctgcaatcccagcttgggaggctgaggcgggagaatcgcttgaacccggaaggaggaggtggcagtgaaccaagatcgcgccactgcactccagcctggacaacagagtgagactctgtcaaaaaaaaaaaaaattcctctttggcaaaacccaccgtaagcaaagtcaaaagacacgctcaggaaaatatttgcagagttcaaacaaacgtttataaactgttcaaacaaatcaatgcgcctgagacgccggaacagaaaggtcagcaaagaccccagcctggcagcccacagaaggatgcccagagaacggtcggattcaccggccaccaaggacacccaaacaaaacaaagatgagcgcccctacttgccagcttggcaaagatttcacagctgcggctgggagggtggggaacgagcgctccaggaaggaatggggtgtttctggaggtttttgtggctggatgtcaaatgtagatggcaggcacagagctcagcagcacatccactcgcaggaatttaacttaaacctcaaccatccaaggggagggattcaggaaggaaggagagagggagggaggcagggagtgggggaggagggggggaagggagggaagggagagaaggagggagggagggggaggaaggaggggggaagggggaagaagggagggaaggagagggtaagggagggaaggagagggtaagggagggagggagggaaggagggagggaaggaaggaaggggagggagaaaggaaggaaggagggagggagagagggaaggagggagggagaaaggaaggagggagtgaaggaagaaaggaaggagggagagaggaaggagggaaggaaggaggggggagggagggaaggaagaaagaagagagggagggaaggagggagggggagggaggaagggagggaaggaagaaaggaaggaaggagggagggagagagggaaggagggagggaggaaggaaggagggagggaaggagggagggaggggaggagggagggaggagggagggaaggaagcggcagagggagggagatagagataggaaggaaggagagagaagggggagagggaggaaggcgagagaaagagagagggagaaggaaagaaagagagaggaaggaaggagagagagaggaagagagaaagaaagacatcaagaaaaagagagacattccaaaagcccagctagggggaccagttaaacacattataaaatcatttttaaagtgataagtcaccaccccctatcacacagagtgccttaacgagcgtcaagaatgagggtggatgtcgaggtttctcgacaaggaaagatgcccagtgatgggaatgaggaatgagagaatagaaccctccttgtgtgaaatctacaggtgaatgtaattcacgaaaatcccagcacaggcttggcaagatgctgaggcccatcggtgctgggctggggaacttaggggcttggccttctttgtacttttcttcattttacctttttagctgttgctttttttggagacagggtcttgccctgttgcccaggctggagtgcagtggtgtgatctcggctcactgcaccactcgatctcctaggctcaagtgatcctcctgcctcagcctccagtgtagctgggaccacaggtacacactgtaacacccagctaattgtttaatttttttgtagagatggggtcttgctatgttgcccaggctagtctcacactcctgggctcaagccatcctcccgccttggcctcccaaagtgctgcgatgacaggcgtgagccaccacacccaggctctcaccaagttctgacgtcaatcagggatcaaagggcttcaggccaaactgccatccctaaaatgacctgcttgagaaacttaagtctatgaaatgaaggggaggcactccagaaactggcagatggtccccagaggtggtacaagaagaagggactcgggtcccgcagctgaccctcagtggctcttagcctcgagaactcagccctgcgatggccagagttgcgcccggcagatccccacggggagcctcttcctctctccttgaggtcacaggcaggtgagtgaccaggcaagggaggaagtcggctctgctcacccctccagcccattccccatgtcagcagaaggaacagcaggctcccagcgacagccccatcctaaccccagaagccgtggacaggtcagctccatgtcaaaagggaccgcagatgggatgaagttaaggatcgtgagataggatagcatccggggtgatctgggggccccaatgtcctcatagcgtcctcaggagaagaggcaggagggtgagagtcaaacagagactggaagaggcttcactgtggctgtgaagggggaggagggggccccgagccaagggatgtgggtgcctctagacgctgggaaatgcgggaaccagattttcccctggagccccaaggagggactggcctgcccacaccttgattttccatgattttagcccagtgaggcctatgttagacttcttttttttttattttttctttttttgagatggagtctcactctgtcgcccaggctggagtgcagtggcgtgatcttggctctgcaacctccgcctcccgggctcaagcgattttcctgcctcagcctcctgagtggctgggactacagatgcacaccaccacacctggctggttttttttgtatttttagtagagatggggtttcaccatgttagccaggatggtctcaaactcctgacctcaggtgatccgcccacctcgacctcccaaagtgctgggattacaggagtgagccaccgcgcctggccctacgttagacttctgagcttcagcgctgtcagataataactgtgtgggagaagccgttctacatcagtagtcacttgttacgtctggggcaggaggtgcctacatccaccagtgcccaaagaggatctagcagctccgatccaggccctcggggcttagtgggcagccccaccagcccacagcctgcctgccagggagctgttctcacagacccccaccatgggacacgtgtttctgggacaggtcatggagaacgatgaccccatcacgggcagtctttccaaaagggcccacgggagatcagaaatcgcaatgtttcttgctgagaattgccgtatcctagcttgcaaacactattagctccgcagctgctagcgtttccctgtcgaaatgaatggggttatttgtttctgttttttagacagggtctggctctgttgcccaggttggagtgcagtggtgcaatcatagcccactgcagcctcgacctccggggctcaagcgatcctcccacctcagcctcttcagtagctgggatttcaggtgtgcaccaccacgcctggctaatttctgtattttttgtagagatggggtttcaccatgttgcctgggctggtctcaaactctcaggctcaaacgatcctccccacttcagccccccactagcagggactacaggtgcgtgccaccatacctgtctaattttctgtagagtttaggatatcgctctgttgaccaggctgatctcaaactcctgggctcaagccatcctcctgccttggcctctcaaagtgctgggattacaggcgtgagccatggcgcccggccagaactgaatgtttgaagaagcccaacaccaaacctgtggcagccccaggaagcaccgggaatgcatagtctgagccctctccgggctctgcacaccttcccgccctgcaccatgtgcaccggaaatgcaggagacctctccgggctctgcacaccttctggccctgccgtcggcacccgaaatgcaaagtctgcgccctctccgggctctacacaccttcccgccctgcaccatgtgcaccagaaatgcaaagtctgagccctctccgggctctgcacacctttccgccttgcgccattggcaccggaaatgctaagtctgagccctctccgggctctgcacaccttcccaccctgcaccatgtgcaccagaaatgcaaagtcggagacctctccgggctctgcacaccttccggccttgcactgtccgcactggaaatgcaaagtctgagcctctccgggctctgcacaccttcccgccctgcaccatgtgcaccggaaatgcaaagtccgagacctccccggactctgcacaccttccggcccggctccgtcggcaccggaaatgcaaagtctgagcctctccgggctctgcacaccttccggccctgcaccatgtccactggaaatgcaaagtccgagacctctccggactctgcacaccttccggcccggctccgtcggcaccggaaatgcaaagtctgagcctctccgggctctgcacaccttccggccctgcaccatgtccactggaaatgcaaagtccgagacctctccggactctgcacaccttccggcccggctccgtcggcaccggaaatgcaaagtccgagacctctccgggctctgcacaccttccagccctgcgcctcctttttcgggctgagcttttctgttggtgtcacagcttcactggggtgcagttacacaccctgcgatgcacactgggcacgctaatcttcaagcgcacatggttctaagggttgccattcatttctacagctatgcaaccatcagcataatctcaatgggacgctgtcatcgactcccagagctgccccgatcccaaccccccagcctccaggcgacctctgatctgtcaccttttctagaattttcctgtaagtggaattgtacaatatgaagtcctttacatttttatgtttggcttcataaataaatattatacatatattttatatctacactttttgcatctacactttattttattttattatttctgagatggagtctcgctctgtcgcccaggctggagtgcagtggcgcaatctcagctcactgcaacctccgtctcccgcgttcaagcaatcctcccacctcagccccccaagtagctgggattacaggtgcctaacaccacacctggctaatttttgtatttttagtagaaacggggtttcgccatgttggccaggctagtctcaaactcctgacctcaggtgatccacctgccttggcctcccaaagtgctgggattacaggtgtgagccactgcacccggcctacactttatatatatatatatatatatatatatatatatatatatatatatatatatataatgctctatctatacatgcatcatgttattgagatgtaattcatatgacatacagtgcacccatttaaaatgcataattctttctgagtattatctgcggcaccaaaaagaagaaaaaaatcataaaataaaaagaaaacgcacaattcaatggcatttagtacattcagagtcctgcaaccatcaccactaattccagaacattctaattatgccaagaagaagaaacccatcaaccatcacttcccatgcccctcccagtctcggcacccacgcatcccctccctgcctctgtggatcggcccgtcctgaaccttttgtagaaaggggatcacatgctgtgtggccttttgtgtctggcatctcttactgagcgtgacgtcctcaaggtacatccacactgtggcctgtgtcaaagcttcattccttttcatggctgagtaacactccatggtgtggatggaggatgttctgctgatccattcacccattgatggacatttggagtctttgccttattgctaaatttgaacatattcttgacttttgagtacatctgtttctgaattacctctcatgaccattgactactaaggatgagaccaaaatgatttatactgggcttagctaaaatatgcatttttaaggtacacattacatgccataaaattcaagtgaagtgtactgctcaaagatacttcagggccgggtgcaatggtacgcacctgtaatcctggcactttgggaagtcaaagcaggaagatcacttgagccacggagttcaagaccagcctgggcaacaaagcaaaccctaactcttttctgtttttctttctttctttcttttctctctctctctctcttttttttttttttagaaggagtttcgctctgtcacccaggctggagcgcagtggcatgatcttggctcactgcaaccaccatctcccaggctcaagtgattctcgcacctcagcctcccgagtagcttggactctaggcacctgccaccacgcctggctgattttcctatttttagtagagatggggtttcaccatgttggtcaggctggtctggaactcctgacctcaggtgatccacccatctcggcctcccaaagtgctgggattacaggcatgagccaccatgcctggccaaaaccctaactcttaaaaaaaaattttgttttaagatttttaagtaagttcaccaggttgcggtcaccccgacccgaccatcgggtccatttccacgtccctggcaagtctctggtgcacattcatgtccccagcctccaatcaccacgagtccctttctgtccctatggctttgccttttctggacatttctgccttcctttctacttatttttaaatggtttcctcttcctacattttaaaagccactcatgattctctagggagaaaaacgaggagtaaatcaacagaggagagctaaagggccagcgacgggtcactctccaggtgcacaggagatacgggtgaaggctccttaaaactccctaccatggcacgaagacaccggaaaggcatgcagcaccgctgtgggcttcccaccctgaccccatccaggggctccggcaccagcaggaccagtgagtgccacgttccctgcctcgtgggcgggaaactctgccaggagctagcagctgttacccacacctgctccccattacccatacttggtggatacaaacagccgacagacccaggtcaaggccaagacgcccgccttgacggcaaccccacgtcttacatccagggtgcaaaacagccaactgaacctcaaatcataacaaagaaatgcattacagcaccgacctgtgcaggaggtctcgccgtctgcagcaccgagatcccgaaaccaagctccactccctggaaaaaacacatagagttagtttggcgtggcttggctggaggcaccatgcatgtgttgatggggtcagcattggagaacggcctcgcgcttgtgattggacaaggacagaaatcattttggcaaccaggcgcggtggcttaggcctgtaatcccagcactttgggaggccaaggcaggtggatcatgaggtcagaagttcgagaccagcctggccaacatggcaaaatcccgtctctactaaaaatataaaaattagccaacgtggtggtgggtgcctgtagtcccagctacttaggaggctgaggcaggagaatcccttgaacccgggaggcagagggtgcagtgagctgagatcgagccactgtcctccagcctgggcaacagggcaagactctgcttcaaaaaaaaaaataatagaaaaggaaaaaagcagaagacaattcactgaaaatatttattattagagatttatgacgttattcctaatacattttccacgtgtttgaaaactgaactgagtgcaaggattgatgtttctacggctcttcacagtttatcaaaaacatctctgtacatctttggagcctcacgatctccctgggaggaagaagaaggggctgagttagtcccacggtgcccagaaggcacccaacgtatccaggtctgcccaggacttttccagagttagcctgaaagtcctgcatcctgggaagtccctcagccccagctcagctggtacgggcagtctctgagcagaaccaggctggcaccacatgcctgaggctgcgaccaggaactccccacctcgggggactcggggggaccctgccaccatcactgacaggacaagctccagggccaaagctgttcctgcaaacaccgtggtttatatgaaatccttgcctccctctggagcctggaatcctggcatgggtcaggcagcaggggcagcagaaccagcccccataggaacgtgggtgctgggtctctgggagcctcgctggtgacagtgctttgggctgttgtcccagctcgctgctggggatgtggcgtgtcccgcgtgacacatggggagagggcctggaagctgggcctagaagccgggcctggcctccccgacccaccccacgagcctttcccttcccaaactctgctctgtgctccatgtcctcttgctgggacaaaccacagtcacaaggaggcctcatgcggagtccagggtcctcccagcgagtcgccccatctctacaaaatgaccccatcttgacaaaaaaaatttaaaaattaggagggtgtagtggtgcccgcctgtgaccccagctactcgagaggctgagatgggaggatcgcttgatcctgggagatcaaggttgctgtgagctaggattgcaccactgcactccagcctaggcaacagagtgcaatcctgtctgagaaaaaataaaaataaatgccacatggggccaggcacggtggctcacacctgtaatcccatcactttggggggccgaggtgggaggatcacctgaggtcacgagttcgagaccagccgggtcaacatgttgaaatcctgtctctactaaaaatacaaaaattagccaggtgtggtggtgggcgcccgtaatcccagctacttgggaggctgaggcaggagaatcgtttgaacccgggaggcggaggttgcagtgagctgagatcatgccactgcactctagcctgggtgacagaacgagaccctgtctcaaaaaaaaaaaaaaaaaaaaaagccacttgggatccaggataggatcctaaaacagaaaaaggacattagaagaaaaaaaccgtgaaactgggataaagagtgaaatttagcttatagaaatgtacccacatgggcttcttggtggtcacaagtatatggtccagcctgggcaacatagcaagaccccatctgccatctctataaaaacaatgtaaaaattagctgggcatggtggtgcaaacctgtagtcccagctacttgggaggccgaggcaggaggatcacttgagcccaggaggtcgaggctgcagtgatctgcgattgtgccactgcactccagcctgggcaacagagcacggcactgtctcaaaaacagaccaaccccaaatgcatggtgacttcataagatgctaacataagggaaaactggtgagaggtagacaggaaatctctggatttctttgcaactcttctgaaaatctaaaattaaaagttcatttaaaaaaaatgcagactttttaaaatgctagtttccgttctacgagctcagggtaatttaccatcaataaaaggtagggatagggagctgaaatcctcactgtcacctgcaggtggtgcccttgccacaggaatgccctggcacccttgggctctggcagcagctggaatcttgcaggatctgctacaccagggcctgccactcaggacagcagcagctcagggcagcagggatgagtgatgaaagggctggagcggcatgcccacggggctgcaggaggcccagactcctgccctccaccttgcagggcagctatgaacataatccttcaactctgaatcatgtgtttttttttttgttttttgttttttgttttttttgagacagggcctcactctattgcccaggctggagtgcaatggtgtaatcacagctcactgcagcctccacctcctgggctcaagcgatcctccttcctcagcctcctgaggagctgggcctacaggtgggcatcactgttgtagtttttatgttctgggaagggggaaggaatgtgcttaatttgtgggctaatttttaattttttaaaaatagagacagggtctttgctatgttatccagcctggtcttgaactcctgggctcaagtgatcctctcaccaccttgtcctctgaaagggctgggattacaggtgtagccatttcacctggacaaccttaaattactgaatgaatttgaagtggtctggtgcgcccttcaactcactaccctgccagcgacaccgtacacaactagggcacatcttatcaaaaccagcaaactgagagaggcggatacattcagtgtagacgctcacccctaggaattattattattattattactttttgagacggagtcttgctctgtcacccaggctggagtgcgatctcagctcactgcaagctccacctcccaggttcaagcaattctcctgcctcagcctcctgagtagctgggattacaggcacctaccaccacccccggctaatttttgtatttttagtagagacggggtttcaccatgttggtcaggctggtcttgagcccctgacctcatgatccacccgcctcagcctcccaaagtgctgggattacaggcgtgagccaccgcgcccagccaggaatcattatttttaaacagccttattgtgaactaacgcctgtaccatacaactcgcccacttgaagtgtataattcattgttttcagtatatttgcaaaactggccaaccatcacctttatgtagttccagaacattctcatcaccctacaaagaagccccctcgccatcagcccccgatccccagccccggcccccacgcacaccctccctgactctgcggatgggtctgtcctggacatttcatagaaatggggtcacacactgtgtggccttttgtgtctggtgtctctcactgagtgtgacgtcctcaaggtgcatccatgctgtgacctgtgtcaaagactcgctcctttccatggctgagtcttactcctcctgagtatggaaggacgtgttttttaaatccattcaccggcggatggacaatcggctcgttccttcttgttggcaattgtgaatctgctgctgtgaatattcgtgtcataggaatcttttttttttttttttttgagacagagtctcgttctatcccccaggctggagtgcagtggggcacgatctcggctcacggcaacctccacctcccgagttcaagcgattctcctgcctcagcctccagagtaactgggatttcaggtacccaccaccatgcctggctagctttttttgtatttttagtagagacggggtttcctcatgttggccaggctggtcttgaactcctgacctcaggtgatccgccagccttggcctcccgaagttgttgggattacaggcaacaatgattcccagccctaggaatcatttttaagatgagttctcactctctgccttcactgcaaacctccctgtccccagccctttaaccccagcccctggctgtcctcaagaccttggacttggcagtgaggcgatccctgcggatgccccttggtctgcactcggcctcagagcagcttgggtcagaggcgagcacagcgtgggtgaagccgcatcccagccgctctgtcctcgggccttgagccgcaccagctggcgccaggctgtcccccagcgaccttcagcggctcactcagcctgacagaaacgctgtgttttcatgttccctgtgtggacaaatcacaatcgacccgggcggccagcagtggagacaaggaggagagacctctccgcgggggttaggtcccctcagaaactgccgagctggggcaacacgaaccgctgggacctcctgttcataaattagtatggatttcaaggcgccaatagcccggctttaaacccagctcagggccctgggcacctatgggcagctggcccttccacccagcaggcaggcaagtctcagacacaggcaagaaacactccaggtagcaggtgccgaatgtcagcagggagagatcagtcccccttgggacacagaggccatggacagtggtggtggtcaggggacctcgtgtacgaagggctgccaccgcctcccggccctccccactgtgtcctggaggcacttctccagatctctgtccgacttccttccttccttccttcctttccttccttccttccttccttccttccctccctccctccatccctccctccctaccttccctccatccctccctccctccctccctaccttccctccatccctccctccctcccttccctccatccctccctccctcccttccctccatccctccctccctccttccctccttcctttcttcctccctccctcctgccttcctttcctccctctctttctctttttctttctctctcttactctctttctgtcttcctttgtctctctctttccttctttcttctttctctttcttttctctctccctttctctctctctctctctctcttttttttttaagacagtctcactctgtcacccaggctggagtgcagtggtgccatctcagctcattgcaacctccacctctcaggtttaagagattctcctgcctcaacctcccaagtagctgggattacaggtgcccatcaccacgcccagctaatttttgtagtttttgtagagatggtgttatgccatattggccaggctggtcttgaattcctgggctcaggcaatccacctgcttcggcctcccaaagtgctgggatgacacgcatgagccaccgtgcctgaccaatttctttctttaaaaaattaaaataggccgggtgcagtggctcatgcctgttatcccagcactttgggaggccaaggcaggcagatcacctgaggtcaggagttcaagaccagcctgggcaacacagtgaaaccccgtctgtactaaaaatacaaaaattagccaggtctggtggcaggcgcctgtaatgccagctactcgggaggctgagatgggagaatcgcttgaacccgggagacagtggttgcagtgagccaagatcgcactactgcactctagcctggacggctaagcgagactccgtctcaaaaaaaaaaaattaaaatattcgcatgccataaaattcccccttgtagaacctggagaatacgatgccaagtgaaataggccagacgctgagagagaaaaacactgcgtaatcccacgtattgtggagtccaaaaacaaaacaagcaaagaaccccaaatacagccaggcacggtggctcatgcctgtaatcccagcgctttgggaggccgaggcgggtaaatcacctgaggttgggagttcaagaccagcctggctaacatggtgaaagcccgtctctactaaaaatataaaattagccgggcgtggtggtgcatgcctgtaatcccagctactcaggaggctgaggcaggagaatcgcttgaacccgagaggcagaggttgcagtgagctgggatcgtgccacctgcactccagcctggggaacagagcgagactccatctcaaaacaaacacacaatcaaaacctcccaaatacatagaaacagaaagcagaagagcggttagtggtagaggagggaaaggaagggggagatgggggtcagaggatacatagtttcagctgtgttggaaacactgagagatgtcactgtagcctgtgaaccagctaaagatattgtactatgggctgggcacaagggctcatgcctgtaatcctagtgctttgggaggttgaggtgggaggattgctgaaggccagaagtttgcaaccagcctgggcaacatagcaagaccctaggccagaagtttgcaaccagcctgggcaacatagcaagaccctatctctacaaaaaatttaaaaatttgctgggcatggtggctccagggatcacgtgagcccagaaggcagaggctgcagtgaaccgagatcacaccactgcactccagcccgggcaacagagcaagactctgactcaaataaataaatcaaaataaaataaaataaataatagaaactgaaaacaaaaaccaggcctcacccacagtgtcgaaggcatgcatcttctagggttattaaggtgctggttgttatttttgcttgtaattctgaaaaggctgatagattttatagcccagtatctccaagcagcgcccaaggacacaaacagccagaccctcagctcccaaacctggggatttgcaacagacaaacacagagctgggaaattccgcagcagggcagatgagggatcgatctgagtcccatgatcctcggccctgctgaggtcccaggaggctgcacacattgaaatccacatcctgagtggggcggagggaggaggagaatcccaggagctggggggcccccctggtttataccgtcttccccatcaggagtttatcctggtgtctggagtgagaagggatcgaagtctatttttttccagatgaatgtagggtctccccctcggcactgtgggcattggggccggatcattctctggggtggggctgtcctgggcactgcggggagctgagcagcgtccctggcctccacccaccccatgccaggggcatcccccatctagagctgttccgttgccttgaatttctgccctctggcctcccctgtcctcatccttatgggatcttcagatggtgcccttgaggcccagggcccgtgtcccctcctcactcagccctcctatccacaggtgactcacagtccccttggcaccacccaggcgctgtccctggcctcgcccatggctaaccttggcaggcatccccaacagaggcgaggggacagctctcgcctgcctcggcgagcccgggttccagaagatgtgcccagcaccctgggccccccaccgccgggtctgggacacagatgctctcctccaaacctcccattcagaccctcgctgtggcgggggcggggccgtgtcttttgagactctgcatatgcacgagggggtgagtttgagtgaggcggtctccatgcagaggaaggtctttatttaggaagccaggtgggggcggggccggctggggaggagaggcggagaggaaagacgagcttctgcagatttcaaacctgtcatttcttttctgacgcataccctcccctcccgcttcatgacaagctctgttcccaccttccccgggttcccagagcagcctcctagacacgatccgaaacagcacgggtccccctcccaacccccaggcactatggacattagagctgggtcactctctggggtggggccatcctgggcactgcagggagctgaacagcatccctggcctccacccactctatgccaggagcacccccagtcacgacagtcacagatgtccccagacattgcctgatgtcccctggggaacagaatcatccccagaaagacctcctcagttagggggttccacagatccccaagagactgtgtcccatgatcctcccccttgctgaggtcccaggaggctgcacacattgaaatccacaccctgagtggggggagggagagaggaggagaatcccgggaactggagtcccctagtttatgttgtctgccccattgggagcttattctggtgtctgttgtgagcagagacgcaattcaattatttttttcgaaataatgaatgcagggtctcccccctctgcactgtggacattggggctggaccattctctgggctggggccatcctgggcactgcagggtgctaagcagcatccctggcctccacccactccatgccaggggcacccccgagttgtgacaaccacagatgtccccagacattgtccagtgtcccctgggaggcagaggcaggaggactgattgagctcaagagttcaagaccagcctggaccacatagcaagaccccatctctacaaaaaaaattttaaaacatagccaggtgtggtggtctgcacctgtgatcccagttactcaggaggctgagatgggaggattgctgagtctgggaggtcgaggctacagtgagctgagatcacaccactgcactccaggctgggtgacagagcaagactctgtctcaaaaaaaaaaaaaaaaaccacacacacacaaaaacaaaaagagaccctatctcaaaaaaaagagggggttaaataatctgactagatacctctcaaataaagacacgcaggcagccaacaggattatgaaaaaacgctgaagatcattaatcagccaggaaatgcaaattaaaaccaaaatgagatacctgttagaatggctatgatccaaaagataaaagataaaaaacattagtaaagatggccgggtgcggtggctcatatctgtcatcccagcactttgggaggatgaggcaggcagatcacgagttcgagaccagcctggccaacatggtgaaactctgtctctactaaaaatataaaaattaggccgggtgcggtggctcatgcctgtaatcttagcactttgggaggctgaggtgggcggctcacaaggtcaggagatggagaccatcctggctaacacagtgaaactttgtctctactaaaaatacaaaaaaattagccgggcgtggtggcgggcgcctgtagtcccagctactcgggagcctgaggcaagagaatggcgtgaacccgggaggtggagcttgcagtgagtcgagatcgcgccactgcactccagcctgggtgacggagagaggctccgtctgaaaaaaaaaaaaaaaaaaaaaatacatatatatataaattagccaggcgtggtggtgggcacctgtaatctcagctgcttggagactgaggcaggagaatcacttgaacctgggaggcagaggttgcagtgagccaggatcgtgccactgcactccagcccgggtgacagagtgagactccgattcaaaacaaaaaaaaaaaaaagaaagaaagaaaaaaaaaagaaacattggtaaggatgtggagaaaagggaaccctgtgtgctgttggtgggaatgtaaatgagcacagccattctggagaacggaatggaagttcctcaaaaaattaaagatagaaccaccatatgatccagtaatcccacttctgggtatacatccaaaggaaatgaaatcagaatctgtcagcctcattcacaatagccgagataggaaaccaacctacatgtccatcgttggatgaatggatacagaaaatgtgaggccgggtgcggtggctcacgcctgtcatcccagcactttgggaggccaaggcaggcggatcacaaggttaggagttcaagaccagcctggccaacatggcgaaaccctgtctctactaaaaatacaaaaattagccgggcatggtggtgcacgcctgtagtcccagctactcaggaggctgaggcaggagaagcttgaacccaggaggcgggggttgcagtgcgccaagatcacgccactgcactccagcctgagtgacagagtgaggctccatcaaaaaaagagaaagaaagatgaactagaccagaggttggtaaactctggcccatgggtcaaatgcagcccactgcttgcttttgtacataaagttttattggcacacagccgtgcgtgttcacttacatatcatccatggctgcttctgggctcctacagcacagctgggaggcctcgacagagagcacatggcctgcaacgccaagaatttacctccggccctttaggaagggttgatataatccgtgtactagagttagatctcagaggaccttgaatgccagaaacgagtaagtcctaatgatttttagcaaagagtaacactgtaaaaccaaatgtttacagatttcatgtgctggaatcctctgggggtggggcagcggagaggccttaaaacatgaaacagcgtcagatcaattttcaatgattgtcttcaaaattaaaactggctcattacaggcgcggtggctcatgcctgtaatcccagccctttgggaggtctaggaggacagatttcttgagcccaagagttcgagaccagcctgggcaacatggtgaaacccggtctctactaaaaatacaaaaattagttgggtctggtggtgcacacctgtagttccagctactggggaggctgaagcaggaggatgtcttgagcctaggagttcgaagctgcagtgagctgaaatggtgccactgcacttcaccctgggtgacaaagcaagaccccgtctcaattaaaaaaaaaaaaaaaaaaaaaaaaatatatatatatatatatatatatatatatatatatatacacataataacatttatcctaaaaagagaaacagtacaaaggcactcagagctgaaactcaaagtcgtctgccagtctctaactcctgacttttgggtttcatgtcctgctttataggactttttgaattctgcccccaaggatccttttcaaaaatcttttgtttcagccaggcacaggggcttgtgcctgtaatcccagctactggagaggctgaggcaggaggatcatttggagccaggagagctggagaccagcctgggcaacatagcaagacaccatcttttaaaaaaattttgtttctgttttggaaaaattttcgatttacagaaaagttgcaaatctagtccaacgttccctatgggcagcaggcaacctaggtaccgaggcaagagactgagggcacgagctgcctggctctgccttcgagatagcagtaacagaattagtgaaagtactaaaagtctctgaaatgcggaaataatggcgtaagctgtctcctctctctctctctctctttgcctcggctgccaaacagggaagggccccatgtccagtggacacatgaccttacctatcattggagatggctcatactccttaccctgcccccttgtcttgtatccaataaataacagtgcagcctggcatttggggccactaccggtcttcatgtcttggtggtagtggtcccccgggcccagctgtcttttcttttacctctttgtcttgtgtctttatttctacgatctctcgtctccacacacggggagaaaaacccacagaccctatagggctggaccctacagttctcaaacgcccctcacccagtttcccctcatgttagtatcttacatctggggtctgcaaattttttctgcaaagggacaaaaagtaagtattttatgctctgtgagctaaagggtcactgttgcatattcctctttgttatttgtttttttacaacacttttaaaatggaaaaggctttttagccccgagctttataaaaataagccaagtataaacaaaacgtggtacatcccccgaaaccaaaatgtacccccgtgttcacagcagcacgattcaccacaccccaaaggcagagacacccaagtgaccaccgagagatgaatggataaacacaatgtcatccattatgccacggaatatgattcagcctgaaaaaggaaggaaattttgacatgggctagagagtggatgaactttgagggcatcacgcccagtgaaatgagccagatgcaaaaggacaaatcctgtgtaactccacgcttaggaggtccctagagagtgagccacaccaaatgtaaactgtagctgttagtcaataatcatgtatccactggctcattagttgtaacaaatgtagcacattaatgagagagggtaacattgggggaaatgcgtaccttttcggggagaggagataggtgggaactctgccttctgctcaattcttctttaggcctaaaactgctctaaaaatagtctattaaaagggggacttgaagagacaaattgtgagagttgtatcacgaaccaagcgttctgatttttttttttttttgaaatggagtctcgctctgtcacccaggctggagggcagtggcacaatctcggctcactgcaagctccacctcccgggttcatgccattctcctgcctcagcctcccgagtagctgggactacaggcgcccgccaccacacctggctaattttttgtatttttagtagagacgaggtttcaccgggttagccaggatggtctcaatctcctgacctcgtgatccgcccaccttggcctcccaaagtcctgggatgacagacgtgagccactgcgcctggccttgattttttttaaataaaggagaggagggccgggcgcggtggctcacgtctgtcatcccagcactttgagaggctgagatggggggatcacctgaggtcaggagtttgacaggagtttgagaccagcctggccaacatggcaaaactccatctctactaaaaatacaaaaattagccaggcatggtggcacttgcctgtaatcccagctacttgggaagctgaggcaggagaatcgcttggacctgggaggcggaggttgcagtgagctgagatcacgccactacactccagcctgggaaatagaggagtgagactccatcttaaaaaaaaaaaaaaaaaaagagaggaggggagggaaagagggagggaaggaaagaggaagggagaggaagagggagaaagggtgggagagagaggaaaacagagtgagagggagggagagaggaagggaaggggaatgagtgtgagcgagggagggatggaggaaggaaggaagggagggagggagggagggatgagggaaggaagaggaaaggagagacacccactttagacaacatgatccgtaagcactgacatttatgactggatccccttccacaagcttcctgaataagccccagagagaagactggtcagtcttggccaaatggattttctgctttcccccgagcccctgtgagtatcatcacaatgtaataccatgaggatcaaaatctcctggccacttaagcctggattaacccacaccagagccatcctcctcaccgaggggccatggcggcgagcggatcacacagcagtcctcatggaatccgtcccaattagcctctgtcggattactcacagaacctgccatccgtggaaggcagattagcctaggatgcatgtgtaaatcccatttggtgaacgaaagcatattctggagatgattagcttatttctgcaagatggcatcaagtgggagataacacatcttcatccccgttacacccacaaggctctgtgtaattctccctgagcctcatccctttccaatcctgattccctgtgggagaaacacaattccttccattgaagggttgatgctgtgggtaagaccttttcatcctcctgctccaaaaccacagggaagggagaaactggacgtatatttttcatctgtttaccatgttcctgccctcaaaggtacaagaagacaagctagaaagtagacgaggctgggtgtggtggctcacgcctgtgatcccagcacgttgggaggctgagatgggaggatgggggcctaggagttcaagaccagcctgggcaacatagtgagacacccccaccaccaacaccccaccaccatctgtacaaaaaatacaaaaattagccagtcgtgatggtgtgcccctgtaatcacagctacttggaagcctgaggcaggaggatcactggagcccaggagttcaagactgtggggagccatgctcataccactgcactccagcctgggcaatggaggaagaccctgtctcaaataaataaataaagacacagtgacttttgcttgttctttcttgggtcatgtgttctgggggaagccagctgccatgttgtggggaaatgcaggcagtgctgtgaagaaatccatgtgttgcagaaatgggccctccaggccgggcacgttggctcacacctgtaatcccagtactctgggaggccgaggcgggcagatcacctgaggttgggagttcgaggtcagcctgaccaacatggagaaaccctgtctctactaaaaatacaaaattagccgggcgtggtggtgcatgcctgtaatcccagctactagagaggctgagacaggagaattacttgaacctgggaggcggaggttgcagtgagccaagatcgtgccactgcactccagcctgggcaacaagagcaaaactctgtctcaaaaaaaaaaaaaagaaaaggaaagaaagaaagaaaagaaagaaagaaagaaagaaagaaaagaaagaaagaaagaaagaaagaaagaaagagaaagaaagaaagaaagaaagaaagaaagaaagaaagaaagaaagaaagaaagaaagaaatgggccctccaggctgggcacagtggctcatgcctataatcccagcactctgggaggccaaggttggggcaggtcatttgagatcaggaatttgagaccagcctggccaacacagtgaaaccctatctctactaaaaaaaaatataaaaattagccagtaattggctaattactgtaattatgcctgtaatctcagctactcgggaggctgaggcagaagaattgcatgaatccaagaggcagaggttgcagtgagccaagattgtgccactgcactctagcctggctgacaaagtgagactccattaaaaaaaaaaaaaaaaaaaaaggaaggaaggaaggaaaaaaggaaagaaggaaggaacgactcatttgggcattttgccctcctgtcaaggccagttggaagctgaggcctccaccaacagccacatgagggcgccctcttgaaagcagctcctccagctccaatcgagccttcagatgatacagccccagcacattcactgccagaatcacccagtggagctgcttcctaactcctgagtgagggtggaaaaaactcaaactcaaattgcttttcctcttgctctcacatcaacagcaatcaacatggccaggtgcagtggctcacgcctgtaatcccagcactttcagaggccaaggcaggtggatcacttaagatcaggagtttgagaccagcgtgaccaacacggtgaaaccctgtctctaccaaaaatacaaaaattagccaggcgtggttgtgggcacctgtaatctcagctactcaggaggctgaggcaggagaatcacttgaacctggggggcggaggctgcagtgagcagagattgcaccattgcactccagtctgggcgacagagcgagactccatctcaaaaaaaaaaaaaaaaaaaaatcaacccaagatatttctgtgaccaaatgtgagaggagtttccccacacaccagctagctgtcccctaattcgattcagttcaattcaattcaggtgctatctacctggagacagccttggaccccacaggttgagggctaaatccccccacaagactgcccctaacctcttcagataccagtagcaagtttgggcctccagaacttccaactgaccagcttgaagttagggttgggtttaatttactacagcagctctcggaattcagggaaacacatttactggtttaatataaagcatattacaaagaatacagacgaaaagatgcataggatgaggtatagggaagaagggcaaagcttccttggcatgctacccttcaggaacctccatgtgctcagctatctcaaagttctccaaaccccgtccttttgaagttttatggaggctttacttcataggcatgactgatcgcgtcactggccactggtcatcacctcaaccttcagcccttctcccctccccagaggctggagggtacagctaaaggttccagccctctcatcctgccttgatctttctggtggccagaccattcctgaaaataactagaagctgtcagccatcagtcgacttatcatcatacaaaaagacatgactttgcagattccaaggattttaggagttctgcaccagaaaaaaatcaggacaaagaccaaataatataataaatataatgcaagtaatataatatcccactgacccacagaaactgcaggatagtaaatgcttgctgtttaagctaagtgttggggtaatttgttacacagtgatagataactggtacatctgcaaagggaaggaagggctgatccacatgactcctccaagcagatgttgctatagtttgaatgtgtctcccaaaaagcatattgtagaaactttaattcccaatgccaccatgttgagaggtgagaactttaagaggtgattaggttatgaaggccctaccctcattaatgccatctctctttctctctccctctcaccctttctctctctctcccccccctcctctttcttccccagttccccaatctttcatatatgtgctcttttgcccttccacctctgacgcagcaagaaggccctcaccagatgccagcacctcgacattggacttcccagtccctagaaccgttaagaaacaaatctctattatttataaattatccagtctatggcattccattatagcagcacaaaataaagacaggtgtgtagtcaaacattaccttttcctaaaagccagcaattggatttttcattttcttgtttttccaatatctatcaacctgataattgggagagatgcaaaagcccagatggataaggtacattcactgagggcaaatcagaagaatgaccaggccaagaaaatgattcattttggcattttgcaaattatcaagatatgcatgccagcaccagtttttaaaactgaacaaatccactggcttttatctatttcctactaaagcaacgtggcttgatcttgacactattaaactggggcttgattattctctggggtggggccgttctgggcactgcacagtgctgagtagcatccctggtctccacctactccaggccaggagcacccccaagtcacggtacccacaaatgtccccagacattaccagtgtcccccagggggcaggcttgcccccagttgagacccaatgctctaaggcatgtccctcaagggcaggacagccagggacctgacatttgatgacaggcctatcctccaccgccccccaggcccggctgcacttcctcctctgggaactgagtgggcaggacgggctgtcagagcccccttcccttcccacgctgacattctgccagcacgtggcaggggcgtcttgtctcgttggaggctggatatagaaacacagccctgtcctttgtgccatcgctgaagttgtcaacctcagccttcactcatcaccacagcaaccatctaaatatgtcaccagcaaagtgctgattgcaaaggaagggggcagagaggcctggacgggctctcacccaggtgcaggcgcaggggaggtgccgggactgggggagtgacgtggctgcttcagagccacgagactgatgacggccaggccgggcgtgacctggaacaggctccactgcaccctggggcacacagaacaaaggggcaggcctgcttgaccctgagggttcaaggtctctgtgagccgaggtcaaggagggggaaggaacaatcagacggttggctctgtgtcctgcaccctcagtgctctagagaccctcctcacccagtcctctaggtcactctgggaggatggccccggctgacaccgtctgccccatcgggaatctattctggtgtctactgtgagcagggagcaaactcatttttttgccagttaatgcaaggtctctcccctggaaaccgtggacattcagagctgggtcattctctagggtgcagctgtcccggacactgcagggtgctgagcagtgtccctggcctccacccactccacgccacgaccatcctcaagttgtgacaacgacaaatgtcctcagacaacacccagtgtcccctggggcagaatcaccctcagttgacaccccctgaattaggaaattccacggacccccaagatactctgtcccctgatcttctgtcctgctgaggtcccaggaggctgcacacattgaaatccacacctttagttggggggagggagagaggaggtgaatcccacgagctggggtcccctggtttacaccgtctgccccatcaggagtgtgtcctggtgagcaggaagcagactccatttcttctccaaataatgaatgctgagtctctcctcccaggcacggtggacactggggctgtaccattctctgggatggagccgtcctgagcactgcagcacgctgagcggcatccgtgacctccagccactgcatgcccggagcacttctcaatggtgacagccacaaatgtccccagacatggcccagtgtcccctgggggggggggggcaggatcaccctgccgtgctggacagtcctcgccacaccccacctcttggaactggaatgtctggtgagacgggcaacaaggatttgggaagagggccatgcgggacaaaaaaaagaaagaaaatgagaacgaacggatttctatttcccctcaatgtgaaaatagctccactgagtcccgaggaaggattgggtggggacgtacgctctggtatggccaaggtggagtgctggacaagagctactccattctgacttcacgactcgctgtctggctgggtgaccttcagtcccttgccactgtcgctgtgcctcagtttcccactctgtagaatgcacatcgaagcagcatccaccctgtgagactggttttggagattacataaatgagtatctataaaatgtttaaagtggtgtctgagccatgggtcatggcacatactggctttattatttagaacctggattacctccttttattattctttttcaatttattttacttattttttgagatggagtcttgctctgtcatccaggctagagtgcagtggtgcgaacttggctcactgcctctgcctcccgggttcaagtgattctcctgcctcagtcccccatatagccagtattagaggcgcccgccaccacgcccagctaatttttgtatttttagtagagacagggtttcaccatgttggtcaggctggtctcgaactcctgacctcaggtgatctgcctgcttcagcctcccaaagtgccaccgtgcccggcttatgttttaatttttattgtatttatttattcatttttattttgagacagagtcttgctcttgtcgcccaggctggagtgcagtggcacgatctcagctcactgcaaactcagcctcccgggttcaagggattctcctgcctcagcctcccgagtagctgggattacaggcacctgccaacatgcccggctaatttctgtatttttagtagagatggggtttcgccatgtcggccaggctggtcttaaactcttgacctcaggtgatctgcccacctcagcctcccaacgtcctgggattacataggtgtgagccaccatgcctgcttttttagtttttacttttcatagagataggatcttgctatgttgcccagactggccttgaactcctgggctcaagcgatcctccctgctcagcctccccaagtgctgggattacaagtgtgagccaccttgcctggccagattacctcctttctggactagaccagagcacagcaaagtgtttctgtctagggcaggatgtaaaaattttcagccttacggaacatatgttctctgttgcagctacacagttctgctgttgtattttgaaagcagccatagactatgcataaataaatgggcatggcccatcgtgtgccaataaaactttatttatagtaacaggtggcctggatttgcccccaaggccattggttgagaccctcgcaaaacagtctaagacaaaatagcaccatttcagcaactaaatactctcatctaggcagtgttccagtcttccatcctgaaattagatgagggtcctgtcaaaaaagattcacctccgatcctcaacatcacacggcagagttagcacagagcatcccttcacacaaaacacacactcatccgggcgcggtggctcacgcctgtaatcccagcactttgggaggctgaggcgggtggatcacttgaggtcaggagttcgagaccagcctggctaacatggtgaaacccaacccgtctctattaaaaatacaaaaatcagccgggcaaggtgctgcgcctgtaatcccggatacttgggaggctgaggcggcagaatcgcttgaacccgggaggcggaggttgcagtgagcagagatcacgccactgcaacccagcctgggccacagagtgagactccctctcaaaaaacaaacaaacaaacaacaaaaattttcacagccccaaggttttgtttctttgaaatgcagaaaacggctgtttcttttcttaccatctatcttctgtgcgtgaatacctcacctctatgtgctcgccagaaaacctcggctgcaaagggcattcggaatatctcatttggggccaggtgcagtgactgacacctgtcatcccagcactttgggaggccgaggcaggaggatcacttcaggccaggagttcaagaccagctggacaacacagtgagaccccatctctacaaaaataatttaaaagtaggccgagcgcaatggctcatgcctgtaatcccagcactttgggaggcggaggcaggcagatcagctgaggtcaggagttcaagaccagcctggccaacatggtgaaaccccgtctctactaaaaatacaaaaataggccgggcatggtggtgggtgcctgtagtcccagctactggggaggctgaggcaagagaatgatatgaatccaggaggcagagattacagtgagccgagattgcaccactgtactccagcctgggagacagagcaactctgtctcccaaaaaaagaaaaagcaaacaacaacaacaaaaaagaaaatctgaaaaactgtcacaggccagagatgggatcctggatggggccctggggcaggagaggacattagaggaaactgaggaaatctgaacagagtgcagacttgggttaatgaagatgtatcaatactggtttattcgctgtgacaaacgcaccatgccattggatgtgaatactaaggaaaattgggtggtgaggagatgaaactgtctgcactgcattcccagtttttctgtaaatctgaaactattctaaaatgaaaagtttatcaaaaaaaaaaaagagacagagagaagagaaggacgacaggcaattagctacttacgctagaaaatgctgtaaaatgtgattgagggaacattaagttcatgtgccagcatctaataatgagatgattatgtaaaacctagaaaagaaagacgctaaaaacgggatatgcaaattggcaggggaaatttgcgcttatgaaaagaatgggaggggtgggggaaccagtggctgggcggttggtcttgtctcctgtttccctggctcggtgacggccaccaaggaccccaaccccagggagatggaggggctgctggagggagcccccggaacacccgaggccaatttcggcagcatggtgtattccctaccaaggctgtcggcatccaggcagcgctcaatgaatgcctgctaagggtgcagccgctcctgggctggaggagggctgcagttttatggatggaaagttctagaaaataagggtgatgctgtggtctgaaggaagaagcaagacaactgataatatgccgtgacatcctgatctttgcacagcgggttagatattgtcacccacacctggtgctgacatttggggccaatggctgtggtagggggctgtgctgagtaccgcagggtgctgaggagcatccctggcctccatcctctctatgctgggaacacccctcaaccgcaaatgtccccagacattgccaaatgtcccctgggaagtaggatcattcctgctgagaaaccacggtcccacaatatccagcttaatccacctgacaaccccataagggatacatataatcctccttccacagatggggaaacacactgaaacgaggtaaagtcagctcaaggtcaccaccctaggagtaagtctcaaagaagggggtggtcgtgtgtgttgactgccactttagtaacagagacccctatgctgggcaatgctggtctaacatggcaagaatcagaaaactaccgctgtgggttgggcgcggtggctcacacctgccatcccagcactttgggaggctaaggcgggcagatcacgaggtcgggagttcgagaccagcctgaccaacatggtgaaaccccatctctactaaaaatacaaaaattagctgggcgtggtggtgcatgcctgtaatcccagctacttgggagactgaggcaagagaatcgcttgaacccaggaggcagaggttgcagtgagccgggatcgtgccactgcactccagcctaggtgatagagtgagactctgtctcaaaacaaacaaacaaaaacaaacacaaacaaacaaaaaaactaccactgtgggtcaaatccagcccaccacttgctttcgtcaataagttttgttgaaatacagccatgcccgtttatgtactatctagggcactttccaacatcaacagcagagttgagtgcctgcaacggagagcgcctggctcagagcgtcgaaaatatttactctctggctctttacagaagaggtctgttgatggctgggtgcagcggctcatgcctgttatcccagcactttgggaggctgaggcgggaggatcacttgaggccaggagtttaagaccagcctggccaacacggtgaaaccccgtctctactaaaaatacaaaaattagccaggcgtggtggcgggtacctataatcccagctactcgggaggctgaggcatgagaatcacttgaactcgggaggtagaggttgcagtgagctgagatcgcgccaatgcactccagactgggtgacagagcgagactctgtctcaaaaaaaaaaaaaaaagaaagaaaaagaaaaggtgtgtggacacctcacaagacagagccccagagccctacatcattacttcaaggcctctgactgttttcttttgaaactctctgtctctctctctctctgagtgctccgttaatattttgttggaggaacaaaaacagcagggtcagcctcctcagggggtgaaataagctctgtctggtgcagcctggttctggccacggagacccaccctcccctcagcctggctccagaggaaggagcaccagtggggatagacccaccccactgtcgggggagcagagactggcagcaggcctgcctctgaggcccccgcgggagccgtgctgtcacctcgaccccgctgtcacgggggacagagctgaggcctgcgctcccagcgccggtgtctgcaggcacacaggtcaccctgactccacaaagtcagccctgcagcctccagacggtcagacttgctgagctaggacggccactgcgtcccatgtggcttgttttcccagaccctgagctgcctcgggcatggctgtgtgacgggtgtggagattcacagagcaccctattctctgagggtcactttggtccagggtctcctcccctaggcactgctgaggcactggggctggagtgttctctcgggcggggctgtgctgggcactgcagggtactgagcagcatccctggcctgcacccactccatgccaggagccctcgccccgccccccacaagttgtgacaaccacaatgtcccagactttaccaggtgtcccctgggggacagaatcatccaccattgacaccccctgggttacagattccaaggaccacccctcccacaaagagacggcgtcccatgatcctctgccctgctgaggtcccaggaggctgcacatattgatatccccaccctgagtggggagggagagagggggtgaatcccaggagctgggggtccccctgattttgggagtttattctggtgtctggtgtgagcagggagcagactcgatatttttccaaataattaaagcagggtctctcccccttggaattcaaggatggatcgttctctgtggtcaccctgggcacggcagggtgctgagcagcatccttggcctccacccagtccatgccaggagctgcccctctcttaactgtgacgaccacaaatcagtacccaactatgtttaaaactctccagctgatctcagacaacccaccttccaccaactcccagcagctcaggagcctttctgatgaccaccctggcagttgcaggaaggccgaggaccaccccggatccccctggacaccggtggctctgagcctcgacctggccagcaccagccaaaaggaccaaccctccaagtgctgacgaacgaggtgaatgaggctcaaggtgacgttgtccggcctgccttctgcctcacacgcttcccccagcttcagccgcctccccgagacccgagagctggggaggagccaggcaggggaacgttcgtcctggctgagctccgaggccatgtccaggggtcatgaatttgaggtcagccctgaggcgggaaggtgacgggtagcatgcggagccccagagagacaacacctggcccattcaaagggcatcaggcaccgctcctgccccagtgggtgtgaagcccaatgtcatcagctcctccaactactctgagaagctgggagatgttctattgtaaaatctcctgatttttagtttcattttattttattttatttttttttaagatggagtctctgggaggccgaggcgggtggatcacgaggtcagcagatcgagaccatcctggctaacacagtgaaacctcgtctctactaaaaatacaaaaaattagccgggcgtggcagtgggcacctgtagtcccagctactcgggaggctgaggcaggagaatggcatgaacccgggaggtggagcttgcagtgagccgagattgcgtcactgccctccagcctgggtgacagagtgagactccgtctcaaaaaaaaaaaaaaaaaaagatggagtctcgctctctcacccagtggcgcagtctcagctcactgcaactgctgcctgccaggttcaagcaattctcctgcctcagcctcccgagtagctgggaccacaggcacctgccaccatacccagctaattgtattttcagtagagacagggttttgccatgtgggccaggctaacctcaagtcatcctcctgcctcagcctcccaaagcactgggattgcaggcgtgagccactgcacctggcctatttttaaatattttgtagagatggggtctcactgtgttgcccagggtggtctagaactcccagcctcaagcaatcctcctgcttcagcctcccaaagtgttggaattacaggtgtgacgcccgatttttttttttttcttttgagacagagtctcactctgtcatccaggctggagtgcagtggtgcgatctcagctcgctgcaaaccctgcctcccatgttgaagcaattctcctgcctcagcctcctgagtagctgggattacaagtgtgtgtcaccacaccggctaatttttgtatttttagtagagatagggtttcaccatgttggccagcttggtctcaaactcctggcctcaagtgatttgcccgcctcgacctcccaaagtgctgggattacaggtgtgagccaccgcgcctggtctgtgacccctgatttttaaatgctggcaataattcaaagtttaaagccactgggttctaccttggccaggtgaccaatgtcaacaccaccagtgtggacgtcacgtgcccctgatgtgttctccccagagccctgaaccccagactattcaagagcaaacatcatggaaactcacgttgggggacattttacaaaactcctgacgagtcctcctcaaaaccactaggttggccgggtgcggtggttcatgcctgtaatcccagcactttgggaggccgaggcgggcagatcacaaggtcaggagatcgagaccatcctggctaacacggtgaaaccccgtctctactaaacaatacaaaaaattagctgggcgtggcagcgggcgcctgtagtcccagctactcaggagggtgagccaggagaatggccgtgaacccgggaggcggagcttgcagcgagctgagatagcaccactgcactccagcctgggtgacagagcgagattccatctcaaaaaaaaaacaaaacaaaacaaaacaaaacaaaaaaaaacccagcaggtcatcaaaaccaatgagtctgagaagtgtcccagcagagtgtaaggagatgtcgggagtcaatggcatgtgggttcctggaaaaaacaagaaaatggaaataaagaccgggcgccgtggctcacgcctgtaatcccagcactttgggaggccgaggcgggcggctcacctgaggtcaggaattcgagaccagcctggccaacatggtgaacccctgcctctattaaaaatacaaaaattagccgtgcagggtggcaggcacctgaaatcccagctacttgggaggctgaggcaggaggatcatttgaacccaggaggtggaggttgcagtgagccaagatcacaccactggcactccagcctgggtgaaagagcgagactccatctaaaaaaaaaaaaaaagaaagaaagaaagaaagaaaaataaaatgtaaataaagtgtggagttgagttcgtgataatgtatggatactggtctttttagaaaatttctttctttctttttttagagagagggccttgtactgcttttgtatattttaaacatacaattgtgtatatttccaatatatttcagagttttcttaggatacatttgtgataatttgttacacagaattagctaactaatataggctgtttccaaaattcaaaactaccctaaaagaaatctgaggccagggaccgtggctcacgcctgtaatcccagcactttgggaggccaaggtgggcggatcacccaaggtcaggagtttgagaccagcctggccaacgtggtgaaaccccatctccactaaaaatataaaaactagccaggtgtagtggcaccttgcctataatcccagctactccagaggctgaggcaaaagaattgcctgaacctgggagccagaggttgcggtgagccgagatcaccccactgcactctagcctgagcaacagagtgagactccatctcaaaaacaaaacaaacaagaaaaaagaatctgaaatataatggaaatacacacaattgtatgtttgaaatatacaaaagcagtacaatccactcttgaagggaatcagaatcgtcacactgctgggaaaagggcaaggtctccaaaggtgactggtgtttttgttttttgtttttgttttgtttttttttgagacagagtcttgttccgttgcctaggctggagtgcagtggtgcaatctcagctcgctgcaacctccacctcctgggctcaagcgatcctcctgcctcaacctcccaagtagctgggattacaggcgcccacaaccatgcccggctaatttttgcatttttagtagagacgagtttttaccatgttggccaggctggtctcgaactcctgacctcaggtgatccacccgccttggcctcccacagtgctgggattacaggcgtgagctactgcgtctggcctgcaaggtgactgttttaaaacacagaggacacctgctgagatgcaaagtcagggagtgttgaagaaaacagagatctccttatgtgatggtcgtaactcgcatttccaccctcgacagcgccgactccatcgggcagcttttctacatagtcaagtttgaaaactgtgccattgtacgtcaccagaaacggactcggttagaaaacaatgctctttcgtaatgtataccgtactacttttcctaaaacggaactgtcataacgcctccccctctggctgagactagaatagataaaaatccagattttcacacactcgggactggtaatgttttaacacatggaaaacgcgacagggttacagactgctttagcttctccaaacaaatccgcaacggcgccaagcactcctaacagttggacgtgttcataaatgaacccaaacagatcacgttctcggagacggatgcacgccagaaattcctgtcgtgcccctgaagaactaacaggtctctctctgcaacggtggacgactggtcaaaccctggaaccagccaggaacagcagcaagtgcacgggctcgggaatgggaatctggctttatggaacctccaggctcaaggggacaccaggaagggacagcttcgtgaccaagcccggtgtgacccaccaaaaatctgcaaccacgaagaccaggaaatgccagcagtgccgagcaggagaggtcgcttgacggtaaagaagcagggagcgttatttagcaaaccaggctggttaaagagtagagaatatcagatgtcgcggcccctctgcagaggacagttctgaaggacagcgatgacctaaattggctcctatgagggactgctgggggaaatatttccccaggatcctataagatacaaagaaaaacatatgaaaacagaaaagatattcccgacacttgggggtctcaatggggcgggggaggtctgaggacatctgtggttttcacgattggggggagctcctggtatggagtgggtggaggccagggacactgctcagcaccctgcagtgcccaggatggcccctccccagagaatgatccagccccaatgtccacagcaccagggggaagagactcaaagttaattatttggaagaaaatattgttgagccagatgcctcagaatgggaccttatttggaaacagggtttctgcagatggacttattattaagatgtggttgtgctggattaagatgagccctaaatccaataactgatgtccttataagacgagggaaatttggacacagacccacacagggaagggggccgtgtgaggatggaggcagagactggagcgatgtcaccagcccaggggcgccaagaaccgccggccacttgccagatgctggaagaggcaggaaggatcctccccgggagcttctgggccgggaacggccctgcccacaccttcgtctcagacttctggcttctagaactgccagaaaatccatttctgtggttttgagccatgcaggttgaagtcattttccatgggcgccctcaaatatccaaacttcaccccacagagaccctcccctaggcacccacatcctggcatgttcagacaccctcctcgtgaacatgcacagcccccaaggcaccagatagacattgatttccatctagaagtgtccgtcaaaccctcagcgatatatctctgccgcccaggctagagtgcagtggcacagtctcagctcactgcaacctccaccgcctggctcaagcgatcctcccacctcagcctcccaaggaactgggaccacaggcgcgcaccatcatgcttgcctaatttttgttttcgctttctgtagagatggggtttcaccatgttgcccaagctggtgtcaaactcccagattcaagtgatcctcccgcctcggcctcccatagtcctgggattacaggtgtgaggcatcgcgcccagcctctttggtggttttcaggaacagctagttagttattctgcagatggaggttcaggagcttgcaccacttcctagacccggctggaggagttgggtgtaattttcagccgggcgggtgcaagactcaaagagatgtgtggcagagagaagctgttcagacagcttctggggttgccaggaagaaacaagccacttgctccgatctgcacattccctccctgtccagggctgatttccacccaggcaggactcccgattcccagagaatctcaaagcaaggcattctcctggccgtgatccggctctcagctctaaagggactccatatctttactgcagacccaaatctgtgtcaccacagaggaaaaacggccgcttaattacacttgcatatatgctcgcaagaattcttccagggagcaggatctgggaacgtcctctggagacagggccttccaggagacgctgagctcggtgttggagcatggaggctgaatctaatccatcaacaggatgccacaggggagcagagaattccatttttttttttttgcttcaattcctttctatacaaccgtggttctcaaccaggggtccttctggtccccaggggatgctaggtggtgtctgggggcatttgtgactgttatgactcagggatgctcctggcgtggagtgggtggaggccagggatgctgatcagaaccttgcagtggccaggacaaccccaccccagagaacgacccagccctgaatgccaagggggagagactctgccttaattatttggaaaaatattgtatctgctccctgttgacaccagacactagaaaaaattcccgatggggtggatggcagaaaccaaggggggccccagctcctgcgattctcctcctctctccctccccactcagggtgtggattacaatgtgtgcagcctcctggaacctcaggaggacagaggatcatgagacacagagtttcttggggatctgtggaatcccctaacccccgggggtctcacctgggggtgattctgccccccatggggcactgggcaatgtctggggacatctttggttgtcacaactcggggtgtccctggcatagagtgggtggaggccagggacgctgctcagcaccctacagtgcccaggatggccccacctcagagaacgatctggccccaaggtccacagtgacagagagtgataaccgctgccataatctataggactgaccatagccacatgcatatggtcacacaaacatgagtgtgactgtccctctgactcaaaggacaaagccagtcccaacctttctaaccctgccacctgtgctgaccaccagtggcctctgtgtggatgttagttagggttcagcagccttaggaaaacagaacaccaggcatccagaccttccactgtggccctgagtggaagaggaggtggcggtggccgacgccaacactgtcacagcaagaaacaagagagtgggtgtgactgtggtcacttccatctcagggcacatgctacattgaggaagtaaaacctggggggagcgagatatacaagaagtgaaaggtgacttgtagaatgttctggaatcttccagaagcttctggaaacttccagaattttctgaaatatagtaggtattgtggcatagcaaggctttggattcagaagctgctgggcttgggcacggagtcaaaaaagtaacagaggaaaagccacggaatgcaaacttccagggatgacatggttgccacacagtgggcaggtgggtcacacccactgtacacaggtcacacttggctctttgaactcagtcacctattatgggtggaggaaccaaatcctgggatggggtaataaatgcatacggtttcagtttccccatccacaacacagggagaagaatcagataaggtgtccagtctcggagggtcctgggcagcaggcagcgcctccaagatcatcacctccaaccctgattctgccaagccccagcctggtaactacttctctcaaggggtcccagctctcagagctaggagtggccttcaacgccaggtctacaccccatgccaacagaatcccttccctgacctttgcaccagccaacccatcctccgtcatgcagccttcgacgatcggaaaccaacagcttctcatgacggtccctccgatttccagacaagcctgattcttaagccagcccagccaagctacagctcctatcccatctccccaagaacagacttcatcgttttctgaatttggtccacgcccatggtgtccgtgaggaaaaataacaacataagtaacatatagtacaatgctaattttttgagacgggatcttgctgttgcccaggctggaatgcagtggtgcaatcatagctcactgcagcctcaacttcctaggcttccaagcaatcctcctgcctcagcctcccaagcagctgggaccacaggtgtgcaccaccatatctggctaatttttaataaattttgtagagatagagtctcactatgttgctcaggctggtctcgaactccagggctcaagcaatcctcccacctaagcctcccaaagtgctggaattacaggtgtgagccaccacacccagccaatactaatatttatacataatatattgaataatattagcagtgattccagcaataacagtgataaccaggaccaccacccatccaggtcacagcctcgtagtccatcccaatcttttcaatgaccctagggagtgattcctatcctgtctgacacacaaggaaacagaaaggttccatgttttcttcaaaattcacacagaaagaaagtcacatggtggctaagtaggcattctaaatccaatgcctcaccatgcctacattccagaaaactctagaaggctctgggagtttctagaaggttccagaagattccagaaccctccatgattcgccacctttcactttttacatatcctattcccccaggtcccacttcctcaaagcaggacagaattttcaaccccttgcattcccatctgcatcttcaccttactcattgtattaactccaggcaccaggtagcaccttcctaaattacctgggcttggcaagacctaaatcaaagacatgacctgctcagtagtcccagatgtgaagaaactcaaaatccaatgccagaatcccttaaaacagaaccagtcagtgtccacagctctattaggcttgacccacagtggagaaagatgagaaacccacagggagaaaaacaggaccgtcttcttacagtctaagactgtcagccaggcacggcagctcacgcctgtaaccccagcatcttgggagaccgaggagggaggatcgcttaagcccaggagttcgagcagcctgggcatcatagtaagaccttgtctctttttttttttttttttttttgagacagagtctcgctctgttgcccaggctggagtgcagttgtgcgatctcggctcaccacaacctccacctcccaggttcaagtgattctctctgccttagcctccccgagtaactgggataacaggcacccgccaccatgcctggccaattttagtatttttagtagagatgtggtttcaccatcttggccaggctggtctcaaactcctgacctcaggtgatccacccgcctcggtctcccaaagtgctgggattacaggcatgagccaccttgcccagccacctgtctctattttttaaaaaattaaaacattttaaaattaaaaattaaaagctctgaaaagtgaccacatagactaacagtgggttttttagtaaaatacacttaacacaaaatttacaatttttttttttttttttttttgagatggagtttccctcttgttgcccaggctggaatgcaatggtgagatctcagcccactgcaacctccgcctcctgggttcaagagattctcctgcctcagcctcctaagtagctaggattacaggcatgcatcaccacgcctggctaattttgtattttagtagaggcggggtttctccatgttggtcaggctggtcttgaactcccgacttcattcgtttcttttttgagacagggtcttgctctgttgctcaggctggagtgcggtggtgtgatcacagctcactgcaaccttcgtctcccgagctcgcatgagggtccccatgtcctacctccccgtgagcccttgtgattgtttgttgttctggttttttaattctagccatcttactgggcgtgaagtggtatctcaccatggctctgatttgcatttccctgaggactgacgcggagcatgttttgaagtgaaaccgacagtttttgtttctttgatcctcctgtgtaaccctcccaagtagctgggactacaggtgtgccccagcaggcctggctaatttttatttttattttttttgtagcaaccaactttttttattttattgtttttgagacggagtcttgctctgttgcccaggctggaatgcagtggcacgatctcggctcactgcaacctccacctcccaggttcaagcgattctcctgcctcagcctcccgagtagctgggactacaggcgcccgccaccacgcccggctaattttttgtccttttagtagagatggggtttcaccatattagtcaggatggcttcgatctcctgacctcatgatccgcccgcctcggcctcccaaagtgctgggattgcaggcgtgagcaacctcacccagccggtctccaactcttggactcaagtgatcctcccacctcggcctcccaaagcgctgggatcactagcattagccacatcaccgggccagatccttcttgcgcagtgtttgtgtggacatacgctttcacttcccttaggtgtacgtctaggagtcaactcacagggtcatatggaaacactgtatgtaaccacttcaggaactgccaggctgtttccagagcagctgtaccacatgatgttcccagcagcgacgcatgaggatccccgtgtctctacctccccgtgagcccttgtgattgtttgttgttttggtttttttaattctagccatcctactgggtgtgaagtggtatctcaccatggctttgatttgcatttccctgaggactgatgcggagcatgttttcaagtgaaactgatagtttctgtttctttgtttttgtttgagatggagtcttgctctgttgcccaggctggagtgcagtggcgcaatctcagctcactgcaacctccgcctcccaggttcaagggattctcctgcctcagcctcccaagtagctgggattacaggcgcgcgccaccacgcccggctaattttgtatttttagcagagactgggtttcactatgttggccaggctggtcttgaactcctcacctcaggtgatccacccaccttggcctcccaaagtgctgtgattacaggcgtgagccaccgcgcccggcctgaagctgatagtttttaacatgaggggtcctggtataatcaactccacagctagaaggaagccggagttttacctggaaaaatgtgcaaggaaacgtggctggttccatcacggagatgaaagagtttgtgcaaaatgcagacagagccatctcataaaagagctacagggcgagctgggcacggaggctcacacctgtcatcccagcatttcgggaggccaaggcgggcggatcacgaggtcaggagttcgagaccagcctggccaacatagcgaaaccccgtctctactagaaatacaaaaattggccaggcgtggtggcacgcacctgtagtcccagctactcaggaggctgaggcaggagaatcacttgaacccgggagacggaggttgcagagatcacaccactgcactccagcctgggcaacagggcgagactccatctcaaaaaaaaaaaaaaaaaaaaaaaaagaagagctacagggaggcaggggtcatccctgcccctgctcccaccccatccggtgaagtctcccactccacgccatgagccttggtttcctcatctgaagacagagcctcagaagagctgccaggggttgctctgggggtaactgcaatgctggggtgaggggcaatcggaaacctgcagctgcaactgtaggagtgagggaggcattcaaataacagtctactgcattctagaagattccatcctgggctcactgaataaggactcccggcaggacacggtggctcacgcctgtaatcccagcactttgggagtccgaggcgggcagatcacgaggtcaggagatcgagaccagcctggccaacgtggtgaaaccccatctctttaaattttgtaaaaatacaaaaattagctgggcgtgctggcgcatgcctgtaatcccagctactcgggacgctgaggcacgagaatcgcttgaacccgggaggcagaggttgcagtgagccgagattgtgccactgcactccagcctgggcgacagagaaagactccgtctcaaaaaaaaaaaatagagatgggttctcactatgttgccctaggccagcctgggtgggaggccaggctggtctcgaactcctgacctcaggtgatgtgcctgcctcggctcccaaaatgctgggattacaggtgtgagccaccactcccggccaagacccgcatctctaatttttttaaaaagactattttccccggaatacctgctagatactctccacgccttctgtgtggtcttcttacctgctcttgaggtaggagcctcttctacagataaagccaacaaacaaaaacgatgctcaggccaaagaagaagatgcaggctctgataaagactggcagtggggaggcgggtgggagcccggaaacttcaaggtgtcactgaagcacaaggtgacatcagacagggagaagaaacaggggagctggagcaggcggagatggtgaaagcctgaaccgagggcattccaggtgaggagaaaaacaagagagagaccctggaggaggagggagggaaattaactgagctgtgaaaaacctgcctggggctgaccggctcttgcacagggacgggccagctcgggcagggacgggcttgctgccgggaggtacccgtgcagaaacaagaaaggagctcctgcaggggctggctagggagctggtggacagcatcggccagaggagctcaaatccgccctcagccccagggggccgagctgcaaaagcgacgtcaaatggacaaaaatcccaccgggcacagaagtgcgaccagcaagtctatgggtttaaaaataaatgatggggccgggcgcggtggctcacgcctgtaatcgcagcacttggagaggctgaagccaggtggctcacttgaggtcaggagttcgagaccagcctggccatttttttttttttttttttgagatggagtctcactctgtcgcccaggctggagtgcaatggtgcgatctcggctcactgcaagctcctcctcctgggttcaagcaattctcctgcctcagcctcgcgagtagctgggattacaggggtccgccaccacgcccggataatttttgtatttttagtagagacggggtttcaccatgttggccaggatggtctcgatctcttgacctcgtgatccgcctgcctcaggctcccaaagtgctgggatgacaggcgtgagccaccgtgcccggcccgcaccagtgctgttgatggaggccccaaagtggtagcgacacaagtgaccctggacggatgcacggatcaacgtagcgtggtccatacacaccccggagtatgattcagccttcaacagcaggcaatcctgacacaggccacgatgaggatgcactttgaggacctcagtctcagtgagagaagccaggcacagaaggacacatcctccgtgatccactcctaagaggttcccagagccctcagattcacagagacggaaagtaggatgggggccgggcacagtggctcatgcctgtaatcccagcactttgggaggccgaggcgggtggatcacctgaggtcaggagttcacgaccagcctggccaacatggaaaaacctcgtctctactaaaaatacaaaaattggacgggcgcagtggctcacgcctgtaatcccaacactctgggaggccgaggcgggtggatcacctgaggtcaggagttcaacaccagcctggccaacatggagaaaccttgtctctactaaaaatacaaaaattagacaggcgtggcggcacacgcctgtaatcccagctactcaggaggctgacgcaggagaatcgcttgaacccaggaggcagaggttgcagtgagccaagatcgcacgactgcactccagcctgggtgacaagagcgagactctgtctaaaaaaaaaaaagaaagaaaaaagaaaataaagtaggatgggagtgccaggggctggggagggggctggggagtctgtgcttcatgaggacacagtttcagtttgggaagatgagaaagttctggaggggacagtggttggttaaatgtacccaaaaaatggttaaacggggaaattttatgttacatgtaatttaccacaatgaaaaatgaagagaaggctgggtgcagtgggtcacacctgtaatctcagcactttgggaggccgaggctgaaggatagcttgagcctaggggttggagaccagcctggccaatatagcaagaccccatctctacaaaaaaatttaaaaatcagccgggcgtggtggcatgcacctgtggtcccagctacttgggaggttgagacaggaggatggctggaacccaggaggcagaggctgcagggagctgtgatcgcaccactgcactccagcctgggtgacagagggagaccctgtctcaaagtaaagtaagggaagcaaaacaaaagaaagtgagagaggggaagcagctgagagtcagagacgggggacagggtgggaagtcacgaggccccgtccactgtgtgtcaaacgtcggatgcccagtaacgtccgtgaccgcccggtgtcctcctcccgagacgagggcctggtgggcaggggacggccttgaacacccagcgacaccctgccgttgtttgcccagtgaaaagaggccactaagaaaagggccttggcaaaacaaagggccccattcactgtccccgcgagaggaggcctgagctctttctcgccagagctctcctgtcccggcccagtttcactttccaaggacactccaaccccacctcagcccccaccgatatcctgctttccaacaatcctctgcctttaccagacacttcatcagagcgagaatgtggacccaggggtgtcatcttggtcccagaggccagggggcagaaagtgccagctgtcaggcagtttcccagccgtgtgtggtctctgtctcagcatttttttttttttttgagacagagtctcacgctgtcgcccaggctggagtgcagtggtgcgatctcagctcactgcaacctccgccacccgcgttcaagcgattctcctgcctcagcctcccgagtagctgggattacaggcacccgccaccacgcctggctaattcttgtatttttagtagagacggggtttcaccacattggccaggctggtctccaactactggcctcaggtgatccacccacctcggcctcccaaagtgctgggattataggcgtgagccaccgtacccggcctcccccctcctttttaaaaatgttgcatctcaggcaaagctgcgctcaacaccccggcccggtgcctgcttgcttcagtctccagcactgggatcccggccaatccccgcaacacattcgggaccggcaggacgcatatgtctccaatcagaagggagatgtctctcctgagctctcttcagtgtttgccgccaagatggggaagacgacgagtttccaacaccctgaaacgatcccaaggagcggagcctttgtagggtggggtcaaaagagactttacttactttttttctttcttttttttttttttttgagacagagtctcgctctctcgcccagggtggagtacagtggcacgatctcggctcactgcaagctctgcctcccaggttcacaccattcccctgcctcagcctcctgagtagctgggactacaggcgcccgccaccacatccagctaactttttgtattttttagtagagacggggtttcaccgtgttagccaggatggtctcgatctcctgacctcgtgatccgcccgcctcggcctcccaaagtgctgggattacaggcgtgagccaccgcgcctggccactttttttcttttttttttttttgagacaaggtctggctctgtcacccacactggagtgcaggggcatgatcttggctcactgcagcctcaacttcctgggctcaagcgaccctcctgcctcggactcccgagtagctgggattacaggcatgcgccactatactcagttaatttttttctcttttttgtagagatggtgtcttactatgttgtccaggctggtctcaagctcctgggctcaagcaatcctctcatcttggcctcccaaagtgctggggttaggctgggcatggtggctcacacctgtaatgccagcactttgggaggccgaggcgggtggatcacctgaggtcaggagttcgagaccagcctggccaacatggagaaaccctgcctctactaaaaatacaaaattagccaggcatggtggcccatgcctgtaatcccagctagttgggaggttgaggtaggagaatcgcttgagcccgggaggcagaggttgcggtgagccgagatcgcaccattgcactccagcctgggcaacaagagtgaaactccatctcaaaaaacaaacaaacaaaaaaaagtgctggcatgacaggagtaagccaccagcctggccaagaagtttaaatcatgatgccgggcgcggtggctcacgcctgtaattccagcactttgggaggccgaggcaggcagatcacatggtcaggagttcgagaccagcctggccaacacggcgaaaccccatctctactaaaaatacaaaaaattagccgggcaaggtggcacgcacctgtaatcccaactatttgggaggctgaggcaggagaatcagttgaacctgagtgagctgagatcgtgccactgtactccaacctgggcaacaagaacaaaactctgcctccagataaaatagccgggcgcggtggctcacgcctgtaatcccagcactttgggaggccgagctgggcagatcacaaggtcaggagatcgagactatcctggctaacacggtgaaaccccgtccctactaaaaataacaaaaaattagccgggcatggtggcgggtgcctgtagtcccagttactcgggaggctgaggcaggagaatggtgtaaacccaggaggtggagcttgcagtgagccaagatcgcgccactgcactccagcctgggcgacagagcgagactccgtctcaacaaaagaaaaaagaaatcatgatgcaaagatgaaaagcaaagtttgccgtacgaaggatggagtcggtgtcagtgctctggggaagtggggagttccctcagcaagaatgacctcagagtagctggtaggtgggctaaggccacctgggctgggagaaccaggttaacagcaccagtaggaagtcaccagggtctcaaggatccccagcagggagagagcaacagggcacctcacccctacgtgttctttcccgaaacccgtaaccccggtctgatcacgagagaaatatctgacaaacctagatcagaagtaagtctgcacaatacccagccggtccccctaagaccgtccaggtcacgagaggtaacgaacatctaagacatggtcccaacctggaagaacccccggagacgagccggctaaatgtcacgtgggattctagatgggtcctggggcaggaaaggacattaggggaagattaatgacatttgaataaagtgtggagttgagagaaatgaacccattgttagccgggcacagtggctcccgtctgtcctcctaacactttgggagtccggggtggcaggatcacttgtgttcaggagttcgagaccagcctaggcaaaatagcgagacctcatctctacaataaaacaaaaattagccaggcacggggttgcgtgcctgtggtcccagctactcaggaggctgaggtgggaggatcgcttgagcccaggagttggaggctacagtgagccatgatcactccactgcacttagcctgggcgacagagtaagactctgtctcaaaaaaaaatgtaaatgtaaatttaaaaaatattacttttaatggcaaagaccacaattatgtttgccccaacataataaatacatacaataaataaataaataagaaaaaaataaacaaaaataaaaataatgcaaaaaaaaagggggaaaaaaatgccaatcatactatgcatggcaccgtgttataggggaaaaaaaataattatataaaattgttcccaaatcattaagcccttctcattatggaggctacaggaataaacgctcctaacaagaccacatttgggccgggctcggtgggcctcccagcactttgggaggccaaggcgggtggatcacctgaggtcagaagttcgagaccagcctggccatcatggtgaaaccccgtctctactaaaaatacaaaaaatagccgggtgtggtggtggacgcctgtaatcccagctactcaggaggctaaggcaggaggatcacttgaacctgggaggcggaggctgcagtgagctgagatggcgccattgcactccagcctgggctacagagtgagactccaactcaaaaaaaaaaaaaaaaaaaaaaaaaaaccatattcgatgcaattctctgaagttaactgttagagctctgacaacacagaggctgaaatgacatgacaaatgctaaagtacaaagttccaagatcaagtcccagcatgaccactaactcgtgaaacctccagacctcagttttcccatgcataaagcgtgcgagatggactcgagggccaacacgctttttcggtaagagtccagatacccagtgttttcagccttgcggtggagccactctctacggcaacgacttaactacaccatggtagcagaatacacagagcagtgtgccaataaaacattatttctggacactaaaatctgaatgccatataattgtcatgtgtcatggccttttctttgacttttgttttttgcttcttttggcggcgggtagaagcagggcttcctttgacttttttttccaaccatttaaaaatggaggccgggcacggtggctcacgtctgtaatcccagcactttgggaggccgaagcgaaaggatcacttgaggtcaggagttcgagaccagcctggccaacatggtgaaaccccatctctactaaaaatacaaaaattagccgagtgtggtgtcaggcgcttgtaatcccagctacccgggaggctgaggcaggagaatggcctgaaccgggaggcagagtttgcagtgagccgagatcacaccactgcactccaacctaggtgacagaacgagattctgtctcaaaaaataaaataaaataaaaataaaaatgggataatcattcttagcccaggggccatatataaaaccaggctgtgggccagaggtggcccaagggcggtggttactgactcctggactggacgtgctccaagccccttcctcagctgcctttctaagattctctgattacaaatccatgtgagtttttctatttcaacctgttggctcaggtctttttttttttcttcttgagacagggtcttgctctgtcgcccaggctggagtgcagtggcacaatcttggctcactgcagcctccacctcccagattcaagcaatactcccacctcagcctcctgagtatctggggttacaggcacgcaccaccacgcccaactaagctttgtattgttaataaagacggggtttcaccatgttggccaggctggtctcgaacttctgacctcaagttatccacccacctcagactcccaaactgctgggattacaggtgcgagccaccgcgcccggccagggcagtgaaactataggataccacaatggtggacacgtatccttacacccttctccaaacccgtagaatcttcaacaccaagagtaaactccaatagagactggggactctgggtgacaatgatgtgtcaacgtgggttcatccattgtgattataacgaatgtaccactgtggtacggggtgctggtaatgggggaggctgtgcctgtgggttgcagggaggtgtatgggaactttctgttcttaccgctcgattttgctgtaaacctaaaatagctctaaaaaaataaagtctatttaaaaacccaactgtatctttgtactttaatgcaataaaagaatcataaaatcattagaaatggtttcggcctggctcagtaacgcatatccgtaatcccagcactttgggaggacgggaccagaggattgcttgagctcaggagtttgagaccaacctgggcaacatggcgagaccccatctctactaaaaatggaaaaattagccagtcgtggtgttacatgcttatagtcccagctactcaggaggctgaggtgggagaatcacttgagcctgggaggcggaggttgcagtgaaccaagattgcatcactacactccggcctgggcaacagagcaagactctgtctcaaaaaaaataaaaattaaaaaaataataataaaaggaaaagagccgggcgtggtggctcacgcctgtaatcccagcactttgggaagccgaggtggaaggatcacctgaggtcaggagttcgagaccagcctggccaacatggtgaaaccccgtttctactaaaaataccaaaattagctgggcgtggtggcacacgcctgtaatcccagctactcgggaggctgaggcaggagaattgcttgaacccgggaggcggaggttgcagtgagctgagatcatgccaccgcactccagcctgggcagcagagcaagattgcatctcaaaaaaaaaaaaaaaaagaggagggaaatttccacggacacccggggagaaggccttttgtgatgacagaggcagaaattggatcaatgaggccataagccaaggactcctggagcccccagggggtgggggaggcagtacgcctccttccctggagcctctagaaggagcgcagccctgctcacaccgtgacttcagactcctggtctccagaaccatgagacaatacatttctgttattttaccacccggtctgtggtcattcatgacggcggcagccccaggctcctcctacaactgggtactgccaaggccagcgaagtccaggccttactttccgaccacattgaagccacagccgtctctgtgcccagcagactctgccaggacatctgcatttgaacttggctggattcacctcttttctttgattcctcctggctttgttgtccatcaagttagggagttttttaagaaggccaggggaggccgggcgcggtggctcacgcctgtaatcccagcactttgggaggccgaggtaggcagatcatgaggtcaggagatcgagaccatcctggctaacacggtgaaaccccatctctactaaaaatacaaaaaatcagccgggtgtggtggcgggcgtctgtagtcccagctactcgggaggctgaggcaggagaatggcgtgaacccgggaggtggagcttgcagtgagccgagatcgcgccactgcactccagcctgggcgacagagtgagactccatctcgaaaaaaaaaaaaaagaaggccaggggcagcagtcttgggcttgtcaacaaaggtcaaatgaacaatgaagtccgacgtggtggctcacacctgtaattctagaatgtgggccggctgcggtgggcgaatcacttgagcccaggagttcaagaccagcctggacaacacagcaagacccggtctctacaaaagatacaaaaattagccaggtgtggtggtacatgcttgtggtcttggccatctgggaggctgaggcaggaggatcacttgaacctgggagttcaaggctgcagtgagctgcgattgtgccactgcactccagcctgggtaacggagtaagcccctatctcattaaaaagaaaagtagatgttcagccaggcacagtggttcatgtctgtaatcccaacactttgggagtctgaagtgggtggatcacttgagctcaggggttcaagaccagcctgggcaacatagtgagactccatctctacaaaaaattagccggatatggtgacatgtgcctgtagtcccagctactctggaggctgaggcaggaggatcgcttgagcccaggagtttgagaccagtctaggcaacatagcaatatcctatctttacaaaaaaaaaaaattagctgggcatagtgatctctgcctgtattcccagctactcaggaggtcgaggtgggaggattgcttgagccagggaggtggaggttgcagtgagccaagatcacaccactgtactccagcctgggtgacagagcgagactctgcctcaaaaaaaaaaaaaaagaaagaaagaaaaaaagaaagaaaagaaaagcagactttcaactaattaacatacatcaaaggtagtctttttctactttaccatcttccaaagagtaactgtacagaaactccaaaaaggtagccatttctgcaaaccagggtctctcccctgggcactgtggacatcggagctctggactattctctggggtgcggccatcctgggcactgcagggcgctgagcagtgtccatggcatccacccactccatgccaggagcagccccggttgtgacagccacaaatgtccccagacgttgctcagtgtcccctgaaggccagaatcacccccagggacaagctctgatttagggcatggctggacatgagacagagacagcaccagataaatgcgtcaagggttaaagaatgaacgcccacattctacccacaacccccccaagtctctaatcaaatgccgcctcctcttggaggctctcagaggtcgaggtccctgtcttcattttgtaaacccatcactcgacacaatatcagacacttaatattgtgttgtgaacgttaataaatgtctgtaaaataaatgactctgaccttgaaacggcaatgtctctatgcctaagaaatcttggttgtttgaggataaaattatcttcctttctctctctggggttgggctacatttgagattgtaaggctgggtaagcacaggggatttgggtcagaaatgtcaaggctatctggaattggtgacactatttttggaggaatctacattttggggagatttttttgttgcttttttttgggggggggcagggaatagcacttaactagttcaaccatagtttttaggggaaaaaaaaaagttttagttgaaaggatctgttctaccatagcctggtatagagcagtggttctcaaccccagatgactgtggacaatgtctggggacatcggtggctgtcacaactcagagatgctcctggcgtggagtgggtggagcccagagacgctgctcagcaccctgcagtgcccaggacggccccaccccagagaacaatccggtcccccctatctgcagtactaagagggagcccctacattatttgggaaaaaaatcaagtctgcttcctgatcacactagacaccagaataaactcccaatggggcagacagtgtaaatcagggggacccccagcttctggggctcacctcctctctccctccccactcagggtgtggatttcaatgtgtgcagcctcctgggacctcagcagggcagaggatcatgggacgcggagtctcttggagtccgtggactcccctagcccaggtgtgatctgctccctgagggacactgggctatgtctggggacatctgtggttgtcacaactggaggtgctcctggcgtggagtgggtggaggccagggacgctgctcggcacctcaggacctgcagtgcccaggacagccctgccccagaaaatgaccctactcaggccatcacagggtagggttgaactcgagctcaggagttcgagaccagcctaggcaatacagggggacctccacgtttacaaaaaaaagttttaattagctgggcatggtggcgtgcatctgtagtcccagctactctgggaggctgaggtgggaggattgcttgagcccggagtttgaggctgcagtgagccaggctgagaaaatgtgtggtgagtggcatggggagacctagcgccctctgtgtacccaccaagatgggccagtctccaccaatccgttccctggcaaacttgtattctactcaaagcttcctcgtggcctcctgtctggaccttccgcagccccctctctacccccctggacgacttcttatcacccctgcacctattcagctcctagaacacacaggcccgaggcccccacctctgtgccaccctgggctcaggcccctctgacccagactgccatctccacggcccccacaccagcacacagatgcctcattcacgtggtgctcccagggcctggcaccagttctgaggcttaaaataggcacacaacgggcctttgtcggatagaggaaggaaggaaggagcgtttcagacaaaggagacagcaacagcagcgtccaggaaacccaggggcaccggggaggtggatggagccaagtgggggtggggtacttgaagggtcagagggcagggccaggccatgcaggaccctgaagaccccatgaggaactggggtgccatcatgtgggtgctgacttgataggaggcagggaagtgaccgtctgatcagtgcccaggaagcttactaggaaggtcctgctggagctggagaaaccagaggctgattcgtcacctcggagtctcccgccagggatgatgaggctctcggctcaagagggagcactgagatgggaaagaaagcagacagaaggggccgggcatgggggctcacgcctgtaatcccagcactttgggaggccgaggcgggcagatcacctgaggtcaggagttcgagaccagcctgggcaacatggtgaaaccctgtttctactaaacataaaaattatctgggtgtggtggtgcatgcctgtaatcccagctactcgggaggctgaggcaggagaatcactggaacctgggaggtggaggttgcagtgagccgagattgcaccactgcactccagcccgggagacagagcaagactccgtcaaaaaaaaagaaaagagagaaagagagagaggagagagaggggagagaggggagagagggaagagaggagagagaggagagagagaaagaaaaagaaaaaagaaagaaagagaaggagagaaagaaaaagagagagagagaaagaaagaaagaaagaaagaaagaaagaaagaaagaaagaaagaaagaaagaaaagaaagaaaagaaagaaagaaaggaaaggaagggaagaaagaaaggaaagacgaaggaagaaggaaggaaggaaggaaagaaagaaagaaagagaaagaaagaaccactaaacaaacatcccaagcttcagtgcagtggactgcctgtgcccaggaaaaagccatttacatcccagcactgtgctccattgcccaaaggcaaaagcggccgagcgtgtgttgctgaatggatggatgagcacagcccggcctgtccacgcaccggaacacgactcagccctgaaaagggtcgaggctctgacgcaggccacagcacggatgcaccttgagcatgtcacacgcagtgagagacaccagacacaaaaggccacacagtgtgtgacccatttctttgaaatgtctaggacaggccagtccagagacaggagggagaggcgtgggtgccagggctgggggagggggtggagagtccccctcatggggacaaaagattttactaggtgatggaatgtttttttgtttgtttgttttttgagacagagtctcgctctgttgcccaggctggagtgcagtgctcaccgcaacctccgcctcccaggttcaagcgattctcctgcctcagcctcctgagtagctgggattacaggcgcccggctaatttttgtatttttactagcgacagggtttcgccatgttggccagactggtctcgaactcctgacctcaactgatccacctgcttcggcctcccaaaatgctgggatcacaggaatgttctgaaaggggcttatagggatgtttgcacagctgataaacttatttaaaagatggaattgcatccttaaaaggtctgaatgttatgaagtgtaaattatacctcaatttttgtcataaaaagcagtaagacttttccttttgcgaggttcaagtaactgttcgtggaagcgtctcggagctgcccacgaaccccaccgcccatccgtgtcaggagccgatgtgggggagcaaccacacagagagagcgtggcccactcacgccgcaggatgggggaggaggaggacaggagtgacccctcgggggccgctgtgtgactgaggatgggtcagcccatctccttagctctcacactcatcggtagggtctcctgggtgacgtaaaccatgaacacttttctctaacccttaagagacagaggccaggccaaagagtgcatgtataaaaagcagtgacaagtgaagtcaagaaatgtcaacgagcggggagaggcgcccgacatcaacaaggacgcagaattgcagaaatcagccgtgaaaggacacagcggccgggcgcggtggctcacgcctgtcaccccagcactttgggaggctgaggtgggtggatgacctaaggtcaggagttcgaggccagcctggccaacatggtgagggccccgtccccccccccgcccgtctctactaaaaatacaaaaattagccgggcgtggtggcacatgcctgtaatggaagctactcgggaggctggggcaggagaatcgcttgaacccgggaggcggaggttgcaatgagacaagatggcgccactgcactccagcctgggcaatgaacgagaccacatctcaaaaacaaaagacaggccgggtgcgggggctcatgcttataatcccagcactttgggaggtcgaggcaggtggatcaccagaggtcaggagttccagaccagcctggctaacatggtgaaactccgtctctactaaaaatacaaaaattagctgggtgtggtggtgggtgcctgtagtcccagctactcgggaggctgaggcaggagaatggcttgaacccaggaggcagaggttgcagtgagccgagatcgcaccactgtactccagcccgggcaacggaatgagaccatgtctcaaaaaaaaaaggacaggccgggcgcggtggctcacgcctgtaatcccaacactttgggaggccgaggtaggtggatcacctgaggtcaggagtttgagaccagcctgggcaatatggtgaaaccccgtctctactaaaaatataaaaattagccgggtgcagtggtgtacgcccataatcccagctactcgagaggatgaggcagaagaattgcttgagccctggaggcggaggttgcagtgagccaagattgcaccattgcactccagccttggtgacagagaaagactgtgtttcaaaaaagaaaaaaaaaagaaagaaaagaaaaaaagaaagcaccagctcccaagcctatagagaccaggcacgaccttcctgtaagaaaccatgaagcatcttcaaaaatacaaatgactctggatacgattttaaagaccatcgctgcttccagatggaactgaaaaaatccgaataacaccttgaatgaagaaaggagtgttttccactactatcggtgaacaagaaaaatgcctccattcagtaaacacgaagctgaattgtctacacgtgagggtaatttgtgtttagttctctttgccttcaaacagtggggccccagggtttacgaagcatgaaacaagaacagaaaataacggtatcggtcaaaggatgttttctaaataaagctcctctgtaagatcgagacgcacctgcagaatttgagcttcgttggaagcttcacgttccaggttaaaaccaagaaagcacattgcaaacattgtcatcttccaatgcttgcaactgacaacttcaggccatcttctaaatcagtactaagtgttcaaaagccacataaaaggcccacctagaaaggagtagcctttttttttttttttttttgagacagagtctcactctgtggcccaggctggagtgcagtggtgcaatctcagctcactgcaacctctgcctcctgggttcaggtgattctcctgcctcagccccccaagtagctgggattacaggcgtgtgctaccacgcccagttagtttttgtatttttagtacagatggggtttcaccatgttggccaggatggtcttgaattcctgacctcaagtgatccacccacttcggcctcccaaagtgctgagattacaggcgtgagccaccgcacccagccataagtaggcatttctaatgttttctaaaagcagtgagaccttacttctcccctctccgaatgacagcactaaatgacttaaaagcaatcctcaattctgaatgaccccacttcctgcacatcaaaggggagatgaggtcgttaaaggagaaaataaatcagttttgtctataacaagggttccacactggagtatctctgtccctacaggacgctgggtgatatccggagacatctgtggttgtcacaatgcggggagctcctggtgtggagtgggtggaggtcagggatgctgctcggcaccctgcagtgcccagaaggccccaccccagaggacaatcagatcccaaatgtccgcagcgctgggatagagagacccagacgcaccccatgaactgaagttgtaaactcaaaatttcaagcgtataatcacagctcgatgtggttccttacggggtgcccctaatcagaatgacccaggcagccttctcttgaacaggtgcatctgttacttaacgagctttgagactctcctgccaccaggtgtgggcaaagtcttctttcttttcagttttttactcacttttaataatatggaaacaggctccatatttgagactctgtctcaacataataataataataacaataataataagacatatttttgttgttgttgcagtcctttttttttttttcctttatttttttgaggcagagtctctctctgttgcccaggctggagtgcaatggcgtgatcttggctcactgcaacctccacctcctgggttcaagcgattctcctgcttcagcctcccaagtagctgggattacaggcaaacgccactatgcccagctaatttttgatatttttagtagagacaggttttcgctatattggccaggctggtctcaaactcctgacctcaggtgatccacccgcctcggcctcccaaagcgcggggattacaggcatgagccaccacaaccagccatgcaggttattttttaaagcttctgggggtgaccctgatgtgtgctcctaaggttgcaggactagagtcaagttccagtcacttcctttcctctcctctgtgacaacccagtcatcccactcctccatctccaaacccaccaaagaaaaaaactggattgagtccattattctccatgcttcaggtaccctcactatatgctaggaaatagtccatgcatacatcccgtaattcgaccctgagaggcacatgctactgtttttattattcccgctttgcaggggagtaaacaacacctccaaaagatgatacagccaaatccgcagcgagaggctgggtcggaacacacacaggcgcacctcccagaggcccccgacactccatcaaggcaagatcgcagcatcccacgacgggaacaagtttgtgaacttggcatttgcctcgctgacacctagcaaccgtgtgaagacgcttagctggggatccgctgcctctgttcatcaagcctgtcttccaccgcccacctcccaacccctagcaacccccgctccccaggaaaaataaagtgccacccacgtcgctcaatagcaccgtcccaaaaactcccactttagttcctgaaaaattcagtcaccgacaggagcctttctccttcctgaagcgttctccttggcaccctatatcctagaaataaacctcaaaaagtattccgaactcccgtctccttcaactcactgttccccagggggttctgccccgtgcccagttctagagcaaacaattaacatctcccccaaaagtagaggggtgagtcctctccaaattccttttaactggatcctacctgagacacctccccacaccccgttttcctcctgattagtcaatgtctagcaaaacacctgcccccaggtgtctccagcctgggaccttacccccacctcccttctcactaactcaccccaacttccttctccctgaacccccttccaccccacacactcacaagctccccatttcccctgatagcccccagaccctttctggaacaagcctgacccccacctgtatgctccagccactccctggctcaccccagctttgtccttctgccccttttcagctaaccctaacccctgggccgtcaatcacacccccccatcttcaccaaccccattcctcagtcctctccccagacaacctcaacatctaattccctctgcagccccctctccaatgaaccccacttcaaactccatccccagccccctctccagctccctgcaaacctcaaccccactcccagctccctcttcaaagaagctgcacccttgactcaacccctgttccccgctccaattaacctcaacccccaacaccatccccagcgtcctccccagctaactcagatttccaattccacttccagccccctccccagctaacctcgacctacaattccagccccctccccagctagcttggacctccaatcccactccaagccccctcggcagctaacctcgacctgcgactctagccccctccccagcaaactcaagacctccaattccaccaccagccccttcctagctaacctggacctgcaattccagacccctccccagccaactcagacctccaatcccgctccaagctccctccccagctaacctcgacctgcaactccagtcccctccccagataactcagacctccagtctcacccccagccccctcctcagctaactcagacctccaatcccacctccagccccctccccagctaacctggacctgcaactccagcctcctccccagctggccctgatttctaagtggagtcccaatgcccagacccaatccttccccagctaacctcgatctgcaccccctgccccgtccccagctaacctcgacctgcaactcccgccccctccccagctagccctgagccccaagtgcagtcccaatccccaaccccagcccctccccagctaacttcgaccccctaagcgcagccccgtccccaattccaaccccagcctccagttgcagcccgggtccccagacccagcccccctcctcagccgactccgacccccaactcggtccgcagccgaatccgagctgtcccagtcccctctccgggacgccggccgcgccctcacttcccctggcccggttcgcgggcgcccttacctgcgctcgggccccgcggccgcctcagccccgccgcgcagccgaaccctccgccccggcccgcgagcgctcgctcccctctgcgggggcggggccgacactcggggggcgggccctggcgtcccggcaaggccaatcgcgagccccggctgcgggaggccggagcgggggcggggcgcggggcaggcagcggggtaggctgcgcccaggagagtggggcggggctccgggcgcgggcggggccgggggcggggcgaagagcggctttccagggtgacttcgtgacgtcaggaaggcgcgagtagtttcgcgagttcgaatcccgcgctaggtgagctggttcgaatcctgcatgccagctccgggggctcatttgctggggaagaatgtcagtgatcataactgctgcaccgctttcttgaagactttataggctccctctcgtgggaccctccgcataaggccagaaggcgagattactatccacattttacagaggtggaaactgggtctcagaaaggtgaaacctaaggtcatttgcccaagcctgtctcatcatttccaagatttctcagtttcctaactcatggccctggatccacaaattcctgagccccaacacagatggaatgaaccagaatcctatagggaactggaccctgaaatctgtgttttgtttagttttcgttttgtttttgagacagggtatcactcaattgccgtggctggactgcagtggtgcagtcatagctcactgcagctttgaagtcccaggctcaagcagtccttccacctcagccttccgggtagctggggccacaggcacgcaccaccacatccagctaatttttgtattattagtagagacagggtttcaccgttttggccaggctggtctccaactcctgacctcaggtgatccacctttcttggcctcccatagtgctgggattacaggcgtgagccaccgtgcctggccctggctaatttttttttgttagagatggggtcttgctatgttgcccaaactggtcttgaactcctgggctcaagtgattctcctgcctctgcctcccaaaatgcttggattacaggcctggaatcttcattttccacaagctcccttgggaatattggaaaacactttgtatgtctccaaaagcagtacacagccctggaaggaagatggagccaccatattctgtgacctcagggatttcatcaggcgctgacactgtgtgtccttgccgccccacctgagccctgggattggagctgctggccaaaatccaagataaacttccccagggttcctgtcatccctgcaagaacctccctgctcatcctctggactccagtggcctgccctgcagggcacagagaaacctccatctccctgcttgccctcctccaggctctccccagctggcatcccccaagaggaatgactgtctagatagagcttgggaagggcacggtggctcacgactgtattcccagcactttgggaggctgaagcgggaggatcgcttgagcccaggagttcaagaccagcctggcaacatactgagaccgcaactctacaaaaaaattaaaatattagccaggcctggcggcgcacaccagtagtcccagctacttcggaggcgaaagcaggaggatcgcttgagcttaggaggttgaggctgcagtgagctttgatcacaccactgcactccagcctgggcgatagagtgagactctgtctcaaaaaaaaaaaaaaaaagtgttaaatacacaatgcaatatgattcggccataacaaagaataaaaccctgtcatttgcagcaaaatggatgggactggaggtcattatattaagtgaaaaagtgaaataagccagacacaggaagacaaatagggcatgttgtcactgatacgtgggaaccagagagttgatctcatggaggtagagagtagaatgatcaataccagaggctggaaagttgtgtaggttgagtgggggggaaatgaaaagaggtgagttatgagtacaaacattcagttagacagaaggaatacattctaatgtttgatagcagaataggatgtattctgctatcaaatatagtattagaataaattctaatgtttgatagcagaatagggtgactgtagttagcaacaatgtattgtacatttcaaaatagttagaataatggtggcttacgcctctaatccaaacactttgggaagccaaggtaggagaatcccttgagggcaggagttcgagaccagcttgggcaacatagcgaggcttcatctctatttaattattattattattattattttcttttttgtgtgtgtgagatggaatttcgctcttgttgcccaggctggcatgcaatgacgtgacgtcagctcaccacaacctccgcctcccgggttcaagcgattctcctgcctcagcctcctgagtagctgggactacaggaacgtcccaccacgccaagcttattttttagtacagacggggtttcaccgtgttagccagaatgggctcgatctccggacctcgtgatctgcccatctcggcctcccaaagtgctgggattacaggcgcccacccggacacagtggctcacgcctgtaatcccagcactttgggaggccaaggcgggtggatcacctgaggtcaggagtttgagaccagcctgaccaacatggagaaaccccgtctctactgaaaatacaaaattagccgggtgtggtggcacatgcctgtaatcccagctactcgggaggctgaggcaggagaatggcttgaacccaggaggcagaggttgtggtgagccgaggtcgtgccattgcactccagcctgggcaacaagagcgaagttctgtctcaaaaaaaaaaaaaagctagaagagagtccttgaattgttcccaacatatagaaatgagaaatagtctaagttatgaacaccccaaatacccaaacatgatcattatatattttatgcatataacaaataccacatgtaccccatacatagatacaagtatttgtaacaattttgaaaaagtgtcatgtgaaaccatgttggagcctaagacaaatggaaaaggtggcatgtcccaatagacatattttcacatatattttcccatcaacttccctttggttttttgtttgtttgttgtttatttgttttttgtttgtttgttttgagatggagtctcactcttgtcgtcaaggctaaagtacagtgatgtgatctcggctcactgtaaactccatctcccaggttcaagctattctcctgccttagcctcccgagtagctgggcttacaggcgcccaccatcatgtccagctaacttttgtatttttaatagagacggagtttcaccatgttggccagcctggtctcaaactactgacctcaggtgatccaccaacctcggcctcccaaagtgctgggattacaggcatgagccattgcgcccggcccctttcttttgttttttgggtttttgttgttgttgatgatgatgttgtttggacacagggtcttgctctgtcgcccgggctggagtgcagtgattctatcacagctcactgcagccttgatctcccaggctcaagtaatcctcccacctcagcctcctgagaagctgggaccacagatgcatgccaccatgcctagctaatttttacattttttttttttagagatgggatcttgctatgttgcccaggctggtctcgaactcctgggctcaagtgatcctcccgcctctgccttgtttattttctttctttctttctttccttttatctgagacagggtctcactctctcatccagggttgagggcagtggctcgatcattgctcactgcagcctccaactcctgggctccagcgatcctcctgtctcggcctcctgagtagctgggactgcaggcacccattgggattacaggcttgaagccacctcacctggcccaattcccctttttcaaatttagcagtatccctggtcaaaaaaagaaacattaaaaattaaattaaaattgtaaatattgagatcactgtggattcatacgcagttgtaagacatagcatagaaggagggccagtaccctctgcccagcttcgcccaatggcaaactcttgcaaaactgcagtgaaatgtcatgaacgggatattaacattgttaagcttaagatagaggatgttggccaggcgcggtggctcacgcctgtaatcccagcactttgggaggccgaggcgggcggatcacaaggtcaggagatcgagaccagcctgaccaacatggagaaaccccgtctctactaaaaatacaaaattagccaggcgtggtggcgcatgcctgtaatcccagctactcaggaggctgaggcaggagaatcacctaaacctgggaggtggagattgcagtgagccgagatcgcatcattgtactgcagcctaggcaacaagagcaaaactccttctcaaaagaaagaaagaaacaaacaaacaaaaaaaggcagaggatgtttccatccctgcgaggatccctcctggtgccttctaagagccacacccaccttcctcccatccccaaaccccatccctaacctctgaccatcaccaatctcttcaccatttcacttatttttatcttttttttttttctgagacggagtctcaccctatcgcccaggctgaagtgcaatggcgtgatctaggctcactgcaacctccgcctcccaggttcaagctattctccagcctcagcctcctgagtagctgggattacaggcgcccaccacctggctaatttttgtattgttaatagagatggagtttcatcatgttggccagcctggtctcaaactcctgacctcaagtgctccacccgcctcagcctcccaaagtgctgggattacaggagtgagccaccgtgctaggcccctttttttttttttttgagacaaggtcttgctctgtctcccaggctggagtgcagtggcacattcacagcttacttgcagcctcaaactcctgggctcaagtgatcctcctgcctcagcctcccaagtagctgggactataagtgtgcaccaccatgtctggctagttattttgtatttttattttattttaagttctgggatacatgtgcaggctgtgcaggtttgttacataggtaaatgtgtgccatggtggtttgctgcacctatctacccatcatctatgttgttttgttttgatttgatttgtttgagacagagtctcactctgttgcccaggctggagtacagtggcgtgatctcggctcactgcagcgcctcacgggttccagcgattttcctgcctcagcctcccaagtagctgggattataggcgcctgccaccatgcctgactaatttttgtatttgtaatagaggcaaggtttcgccatgttggccaggctggtctcgaactcctgacctcaactgatttgccggccttggcctcccaaagtgctgggatgacaggcgtgagccaccttacctggccaacttttttcactttttataattatctgattcatctaggtggtggcttgtcttagtattttgttccttttgactgctaagtaatattccacaatgaggatggggcacaatttgttcaaccatccacccactgaaaaccagtgtttggctcttactaataaagctgccgttaacattcctgtaagggtttgtgtatgaacataaatcatttctctgagataaatgaccaggaccacaatcgctatgtcatatggtagctgcatgatttgttcttgaagaaactgccaaatattcttccagagagttatatattttttaatgttttcttttgagatagggtcttaccagtttgcccaggctggttttgaactcctgggctcaagtgatcctcctgccttagcctcccaaagtgctgggattacaggcatgagcctgtattttttaatggttactttttttccagaacactaaagcagttgaaagtattcaaggattgaaaagatgttgtattcaaactcacaatgtcatgtgtctttttacaatgttattattaagtttctttatgtccaaatagactttattataattttactgtcctagttttagtagaagcaaatcctactaaatcatcagtcatattttcaaaatctacttctggaaaaaatcaaccactaaaaatgcatacagatatataaaggtgctgggccgggcgcggtggctcacgccggtaatcccagcactttgggaggccaaggcaggtggatcacgagatcaagagatcgagaccagccttgccaacatggtgaaaccccatctctactaaaaatacaaaaattagctgggtgtggtggcacgcacctgtagtcccagctactcaggaggctgaggcaggagaatcgcttgaacccgggaggcggaggttgcagtgagccgagacgtgccactgcactccagcctggcaacacagcaagactccatctcaaaaaaaacaaaaagaaaagaaaagaaaaaagaaaattagatgggcacagtggcacacacctgtagtcccagctactctggaggatgaggcaggagaatcgcttgaactggaaaggaggaggttgcagtgagccgagactgcaccactgcactccagcctggacaacaaattgagacagtctcaaaaaaatagaaagatatgtaaagatgcttaaatatttggtatatgtacacatgcacacatttttccttttgcctgaggctctcaggggaaggttggatgctgtctttatttgggactttaaaattttgttcaatgcagattttttgtactcatgtcaatttttaaaaaaatattgcattaggaccaggtgcagtggctcatgcctgtaatcctagcactttgaaaggccaagatgggaggattgcttgaggctaggagttcaagaccagactggccaacatagtgagacccccatctctactaataatacaaaaaataaaaattagctgggccgtggtggtgcatgcctataatcccggctactcgggaggctgaggcaggagaattgcttgaacctggcaggtagaggttgcagtgagcagagatcatgccactgcactccagcttgggcaacagagcaagactctcaaatacatacatattgcattagtgagggtggctagcgtggctaggagggatatcacgagggagtctttggtgtcgcttaagtgtcttgtttgtgcagtggcttacacctgtcatcccagcactttgggaggccgaagcaggaagatccgttgagcccaggagttcgagaccattctgggcaacatggcaagacccccccaccatatctacaaatatatatataagaaaattagccgggcgtgctggctcactcctgcaatcccagcactttgggaggccgaggtgggcggatcacgaggtcaggagattgagaccatcctggctaacacggtgaaacccgtctctactaaaaatacaaaaaattagccgggcgtggtggcgggcgcctgtagtcccagctactcgggaggctgaggcaggagaatggcgtgaacttgggaggcggagcttgcagtgagccgagatcgcaccactgcactccagcctgggcgacagagccagaccccgtctcaaaaaaaaaagaaagaaagaaaattagccacatgtggtgacgtgcatgtgtctgtagtcccagctactcagttactcggggggcgctgaggtgggaggatcacttgagcccaagagattgaggctgcagtgagctgtgttcacaccactgcaccattccagcctgggcgacggagcaagaccctgaccaaaaaaaaaaaaaaaaagtatctcgtgacggtgtttagaggaagttatgcgtgtgataaaactgcataaaccacacacacactcacacactcagatgagtgcatgcaaatccagtgaagcttgcatccttccactgtgctggttttgaggttatactgcagttatgcaagatgtaaacatagctggggggctgggtgcagggtgcatcagacctccttgtaccttcccgtgaatcaataattattaataaataaaacgttttaaaaattgcaatgaaggccaggcacggtgtctcatgcctgtaatcccagcgctttgggaggccaaggcaggtggatcacctgaggtcagaagtttgagaccagcctggccaacatggtgaaaccccatctctattaaaaccacaaaaattagccgggcatggttgtgggcgtctgtaatcccagctactcgggaggctggggcaggagaattgtttgaagccgagatcacaccactgcactccagcctgggcgacagagcaagactccgtctcaaaaaaaaaataatttttaaaagagggtgtctcaaaacccatggtcacttggagaaatagaggagggggtcccaggcaggtgctatgctccctgcagctgcagctgggatcccaccatcttcacatctgacctggaggacatatcactaaccacggccctctcccgcctcctgggatcctggcaagccagactccaaccatacattcacattacacagatagggaagctgaggtcctgtgggttcctgcctttgtaaaatagggctcttagtgcctgtccgacctcctcagccagctgcggtaagtacacggtacagcggggccctcgaggtctcttgagggaaatgctgaaatgttcccgtaaccccctggcatccttctcgtgaaagtccaaactcttcccacagcccaccaggcactgtttgacccctgctggcgaccttcaacttcactggccaccttccctctcctccctccactcctcccagccaggcctcacctgttcctgctttgacacctttgctggtccccctgtccagtgctccgtcccaggtccccttggagctggcctctcccccgcttcccacatcagcaaacacgtcagcttctgagtcagacctcagaaggcctgggactcccagccacgtcacttttgtgatgcaggtttatcttctgcgtagggagcatgtgtctgcgatgatttgatccacttcttcatagggaatcatcgtccccagtgggttatgctctctgagcaggcagggggctctggggctggtgtctgtcactgctgtgtccccagcatcagggcaggaccaggcatagagtggtgcctcttacatactggatgaatgaatgaatgaatgaaccaatgaatacgtgaatgaatgatgtctcagctcttccttccttccagtctggtcctgaacaacgccttacctcttcaggtcagatccctgccccagcctgctctgggttaggggtgaggggtgggggctgggctggcagatgggacaagcagggaaggtcccctgacatggtttggctctctgtccccacccaaatctcatgttgaattgtagtcccgtgttggaggtagtgcctgatgggaggcgactggatcatgacggtggatcctcatgaatggatccacccctcagtcctgtctcataatagagttctcacaagatccggtatggcacctcctcccctgtgctcctgctccggccgagtgacctgcctgctcccctctgccttcccccatgaccgtaagtttcctgaggcctcccagaagcagctgctgccatgcttcctgcacaggctgtggaactatgagccaattaaacctcttttctctatcatttacctgtatcaggtatttcttttctttttgtggggcggcggggggttggacagagtttcattctcgtcacccaggctggagtgtagtggcacgatctcagctcactgcaagctccgcctcccgggttcaagtgatcctcctgcctcagcctccctagtagttgggattacagactcccgccaccacgcccagctaattttttgtatttttagtagagacagggttttgccatgtgagccaggctggtctcaaacttctggtctcaggtaatatgcccttctcggcctcccaaagtgctgggactacaggcatgagccaccgtgcccggcctgggtatttctttatagcattccaagaatggactaatacagtctcctctgccccaacgccactgggcctgcaaggaaattgtccacgttcacagaaagtccagctgggaggatgtccccagctaatgtgcacagagtgaatctggaaaccaacaccctagaaaaaagccacataaagacatctccaagcagagtcccagacgggtcctgccttgcctcccctgctgcatgtcctcaacccactccctccacctccccaccaccatcccatccttcgcttcctacacaggtcccctcctccactcttcaccccatccctcactttctacacccaccacctcctccacccttcctcccatccctcacttcctccacccatcacctcctccatccttcatcccatccctcacttcctacacccatcgcctcctccacccttcaccccatacctcacttcctacacccatcacctcctccacccttcaccccatacctcacttcctacacccaccacctcctccacccttcatcccattcctcacttcctacacccaccacctcctccacccttcatcccatccctcacttcctacacccatcacctcctccacccttcatcccatccgtcactgtctacaccgatcacctcctccacccttcatcccatccctcacttcctacacccaccacctcctccacccttaatgccatctctcacttcctacacccatcacctcctccacccttcatcccatccatcactgtctacacccatcacctcctccacccttcatcccatccctcacttcctccacgcaccacctcctccacccttcatcccatccctcacttcctacacccgtcacctcctccacccttcatcccattcctcacttcctacacccaccacctcctccacccttcatcccatccctcacttcctacacccgtcacctcctccacccttcatcccatccctcacttcctacacccaccacctcctccacccttcatcccatccctcacttcctacacccgtcacctcctccacccttcatcccatccctcacttcctacacccaccacctcctccacccttcatcccatccctcacttcctacacccgtcacctcctccacccttcatcccattcctcacttcctacacccaccacctcctccacccttcatcccattcctcacttcctacacccaccacctcctccacccttcatcccatccctcacttcctacacccatcacctcctccacccttcatcccatccctcacttcctccacccaccacctcctccacccttcaccccatccctcacttcctacacccatcacctcctccacccttcacaccatccctcacttcctacacccaccacttcctccacccttcatcccatccctcacttcctacacccaccacctcctccacccttcaccccatccctcacttcctacacccgtcacctcctccacccttcatcccatccctcacttcctacacccaccaccttctcaacccttcaccccatccctcacttcctccacccaccacctcctccacccttcatcccatccctcacttcctacacccatcacctcctccacccttcatcccatccctcacttcctacacccatcacctcctccacccttcatcccatccctcacttcctacacccatcacctccttcacccttcaccccatcctgcacctccccacccttcttgatcctttacaggcggtgagctgacaccccacgcccaccacagagacagggcgccatgctggtggggaatgcaggatccacttttttattgcaggaagactatgtctagagcgaaggctacacagaccccacgatgggggagtgggggcacccacatgcggggggagagggggcaggggcggagtcacagcaagcatggcctggcacagtccccagcaccagggatgcccaggcaggatgggccagcagccaggacaggctcgggtcccctcctattgcagatgccctctctccccagggtcgggcagggcctgaggtgggagaggcctggaggtgggcagggccccaaggagattgtgctatcagggtgtgtccctgagaaagggccgcagacccctgcccagcctcactctctccggcaccttcagaacccagaagctactgccaggacaggagaggaggcaacatcagctgctggtgggccctgggccagcccaagttttggggggacccagctctgctcagacacaatgccagctcttctgggagcccggtccacgtgctggatagcaacacacacgcacgtgtgcacactccctctctctgagtgtgtccaataaacatttgttgagtaaacactcacacgaacacagaggaaaacaaacatgcttgtaccaaatcagacacgagcaatctgttacctacatagtcccacctggccacatgactacagagacacatgtgtgcaatctctctctctctctcactgcacaaaagggcgtgcgcacacacacacgttgcttcctcacacccaataagaccaaaacctccatctcaccttccctcactaacttagctgccatgctccgagccccgctgtggagagacccacatggtacagaacaaagggcagcttccagccaacagccagcgaggaactgaggccttcagtcttgcaacagcaaggaactgaatgctgcaacaaccacatgagcttctaagaagcaaatccttccccgatcaggccttcagatgagacctctgcctggcgaatgctttgattgcagcctcctgagatcccaagtagaggacccagccaacctgcacccaggctcttgacccacagaatctatgagataataagcatgtgttgtttctggttgctacatttgtggtcatttgttacacagcagtagctgactgatacagatttggaaccgaaagtcacattgctagagtcatgttgctatagagtggaacacagatcgtgtccctcaatcaggacaaacatatttacagataaatgctctcagataaaccatatcacccactccccaaaatatagtcatgctcatacaggcacaaagattcacacagacacctcacacatatccagtcttgctgacaaccacacacaggtatctacaactacccacctctctgtataccctacaccactattacacacacagactgccacaaaaacatatcatcccagacagacacacacaggtatacacgcagatgcacttagatacaagtcacccatccgcgcaccccaggttgcacaaatacaccattccatagccacttccgtgtatgttggacacaaccctgtggggtcacacgagtgtggtgtcactcagactctctcaaaaaacacccagaacctcatggctgcaggtacactcgactccaggacgccaccttcccgggcaggccctgctctctggggcacaggtggtggggaggaagtgggtggggcagacctctgtccggggcgccctcggatcctgctggtgctggctcccatcggctgtccccccacgggggtgtaattgatgtatctctggccggggccccgggtaccccctcctgagcaccccaggtccccacccgccatgcgttgctaacgtctctgtcttggtggaagaggcgggtcccgggtgggcggtgtccgggaagcccctccacgcccatggtgcctctccagcggggcagttgtgctgtggatgtggctggtcccgggggtgggattcggggctggcaggggcactgctgcaggccctgtggttattgcctggtggcctgaggcccatcccacgggccccacaccccactgtgaagacagaggagagaggtgcgtctggaaccggaggagtgggcacagatcagaggtcacgacgggccgggtgggcttgggtgtatgttaacaccaaataggagaaaaaagaaaaaaatatctgaggccgatgtgcattttcaactcccccctcccccagaaggtcacagtgatcaaatgtgagggacaggacgcgcaggtctggctggggacaccccagggaaagagatggaaacggggaaacgcagcctcctctggtcctggtgggaacaagcagctcctcttgccagctccccatcctgttttcccatctgcaggacaagggggccacctccggctcttggttttggagggtacagacagaacaggagggtggagagagagcaggggaggaagaaaagccccagccctgcctcggggtgggcaggggcagcggaggggggggcggtggcctcggtttccccagccgaggtgtcggaggaaggatgagagaagaggaggaggccgaggagggtgtcggtgttgggggaggcagcgggggtcagtgggggtgggcggcgggcaggcgggcgttccgggctcacatgagggtgcatttgcccttgacgcggtctgtcctcttctgcttcccggagcgcttgccgtcgatgttgaggctcatgttccggcgcgtctccagcgtcagcagctcctggaagagctccttgacgttgtagttcatcttggccgaggtctccatgaaagcgcacttccactcctgggccaccgcctgcgcctcgcgcgtgtccacctcccgctgcgtctcatcgcacttgttgcccacgagcatcacggggatgtcctccacgctgcccttgatctgcacgatgagcttgtagatgggccccagctcctccagcgactgcttgctggtgacggagaacaccaggatgaaggcgtggcccttggagatggacaggcgctgcatggccgggaactggtggctgccggtggtgtctgtgatctgcagcgtgcacacgctcttgtcgcagctgatcacctgccggtaggtgtcctcgatggtggggatgtaggtgtcgcggaacgtgcccttcacgaagcgcagcaccagcgagctcttgcccacgccgcccgccccgaacaccaccacgcggtaatcgttactctgttccggcatcttccccgcggcgggtgggcggccggggccgggagggctggtgccagctgcaagaaccccagaccgagcctgtgcagagaggagggtcacacgtcaaaggccacccaggcttgaggggacagccccacgccccggggagggaggaggacatggcggcttctcagaggaggtggctgccgtgcctcctgcctcctgaaaaggcccatttgcttgtggctgactttgcagttctgtcccacaggcgggcgcacagccaacaccctttgcttacttctccctaacaaaatctggggcctgagcttccccgggggacgctgagctaggagaggcgtgggagacgccgggatgcccacgaaactccttccccgggtgtgggtgtcccttccaggctgtgccagcttccccctctcttcccagtgtggcaggggcccctggaagctagcaggcctggcttccacctctcgctccacacctgcctggctctgagaccttgccgagccatcatgccaccctgagcctgtttggtggctcaaacggtgcccgtctccaacaaccatgggtcccctgctcttccgccaacccagagatggccaatcctcatggaagccgcacatggtcgggtgtttaagatgcatatgtcagggccgcagccctaggtgtgatgaatcggtcggccagggcaacggccctgggaactcgtattttattttattcttcttatttatttatttatttttagacagagtttcgctcttgctgcccaggctggagtgcaatggcacaatcttggctcgccgcaacctccacctcccgggttcaagctattctcttgcctcagcctcccaagtagctaggattacaggcatgcaccacaaagcccggctaattttatatttttagtagaggcagggtttctccatgttggtcaggcaggtcttgaactcctgacctcaggtgatccacccacctcggcctcccaaagtgctggggttacaggcgtgagccactgcacctggccttcttattttttttaaaaccaagtcttgctctgttgcccaggttggagttcagtggtgcaatctcggctcactgcaacctctgcctcctcggttcaagcaattctcctgcctcagcctccagagtagctgggattacaggcatgcaccaccacacccggctaatttttgtattttcagtagagacggggtttcgccatgttggccaggctggtcttgaactcctgacctcaggtgctcctctcgcctcgggctcccaaagtgctgggattccaggtgtgagacaccgcatccagctggaacttgtattacagggctgctctcctcacctgccataaatgggatcctgaggctgggaatctgagaaccacaatttgcaaatcagggcactgattcccaatagccgccccagggaggaagggtcttgcagcccaggtgggacacaaaaatacaaaatccagaagctgaacgggaaaatcgccactccctaaactctaaaatcaaactatggcctggtgtgccctagcccctcccgttcaggtctgaaggatccttagaatagcacttcctgggaggggcacctcttagcccctctcttccttcttgggctcagagaggtccagcagcctgaggaggtcacacagcacagcagatcctgaaatgatggaggtgggggaagaacgctggggggagggcgggtggcttatctccagaattgatgtcctcccctccccttcctccttccaggctctggggcagcggtggggggtgggggaggggtgttccccagcaaggtggtctacagtgggagaggaggaggaaccagtttctacctgctgcactgggggtgggggtgtgtttatggggagggtccagaggttccccgggggtcagtggtttgaacctaaacaggcaaattcaagtccctaagcctccgttttctcttctgtgaaatgcgagccactgttggggcaagtaaggtgacaaggtggagaaaggccctaggcagtgccctgtacagcggagaccccgatcacaattgtgatcacagtcacaagggcttggggccggtgggcagggcacttggctgtgcctgttggttgcaaaggcaccttctggattatcaagggtaacagatttgccaggaaaagaaaagaggctgatgaaagcgccagctgacacagtccccagttgtgatgagccaggcaaacttctgggcgcctcggcaatgccaactcatgtgattggctgccgggtttgtggactacatgcatagtaatttctcggcattcggaggaggctgggggtgctggtggtgggggggaggcggcctgtgctgcagaccctgccctttcctgggtgggcgccctgagaggcgggcacgctgctgtgcagaaagacgccaccaagaccggcctggggtcctaatggccatgggttctgtggacccagatccagcctttgccttgctgcgggcactgaagctccagcccccatgagcagtactgtcctccccgctgggtctggaatccctgaccagaaaggcgcttgcactcaacagccccgaagcccacgccacttcccacctccaccgcctggggggtgcgggtggagggagggggtcgtgggcaccgaggcaggagcaggaggggctggctcaaggtcacagagcaggggggtggaggcgcacagcggggctggaagcccaccctgcttggctagactcctggggtttcccgcctgtgcggggcagcccacccccagacgtccaggcagggccaatctaccccagccctgggtccctgaagcccggctcccggccgggcacggcgtggttggtgggggcgggggtgtcaaagcaaagctcagggtcaggaaagcagagagagccgcgacccaggggtctagcgggggtcacgcctgaccaagggtggggcgggggtctgacccagggccgcctggccggtgaggggtttgatggagaaagggcctgctctagggggcccgagggcgcagaggcacagtgcggggccagcccaggggcgacccttgactcaggaggacctcagtggtggagaggaggagcccaccccggggagggggcgcggagggaggggcttggctgggcagcggggcggagggcgaagaaggcggctgcaggagggaggaggccctgcccgaggggaccaatgcggagaggggcggcggggtgggcctcggtggggcgggctcggcaggggggcgccctccgggtgggggaggggaggcggccgggagctgtccaaggtgagcgcggaggggccggccgggcccggcgggaagggacgggggacgcccggcgaggggccccggagccacgcggggaagggcccggccccaaggcccgggaggctggggccgggacaaaggagggacgcgcggcggggaggacggccggctgggggctgcgcagggaccccctccccgccccgggccgcctacctgggcccgctggtccctgcggcgccgcggccgctgctcctgcccgctccggtgtccgctggcgccgccgccccccgcccgcccgagccgccgcagtcgcgcccgcgccgtccccgcccgccgggccccgcgctccgccccgccccgccccgccccgccccgccccggggacccgcgcccacggggccggcgcgccgcccggccaaggtcaccgccgccccacgcgggacccctgcccgcgcccggggtgggagaggtcgccaggatccgggacccccgccctgccacgtagccacctgcgcgcgccctccctcggggtgggagctggggccgcttcccggggaaccccgagtgggggccaggagcccggcttgggaggagcagagtccagccgggggtggagggctttggcagaaatgcggataaagggggtgcagaacgggacccctgaggccggctggggcccggtcacacgcagggcggggaatcagaggggtgcgttgtgaaatgagtaagtcgataatcaacaatcaatgaacaggtttagaagcgggcagaggcgggagggttcaggtcaatggggtgcacctggaggcccacccatcccaggggcctgggcaggggcgggatgggggcagaagcggactcagcgctctgtagggctggttttgtggaggcggaggcagcccatggcagtcaggcctagggaggtggggggtgagcaaagggggctggcgctgctctgcagcggatgggtttgccgttttcggttaggaaaatgtttgtgttcccccaacaggaggtgtcttaggggagcactggcttttctgatgcgtctgtgtgtccacaagagaccatggttccgcctccattttggagaccgggaggccgaggttccttttggcctcatcgggcagatcccagaggagactggactttggggtctagtgaccaggccagaaggtgctctcaggggtgggtgcgggacagtcccaggccgcaaggctgtcagaggaaggcgccccttggtggagaggccaactctgggacccacaggggtctctccagagtcagagccatcagtgggtgagaggctggtctggaaggtggtgagctccccatcaccaggcctgtgagcaggtgaaccccttgggccctcagctcctggggttctccatgacccaccatttccatggccctggatgaggtgggcccatctgcctctgcggagacttggcactgcctccaagaccactcagtcccctctcctgttgccactgaggctggggcactgaggttcaagcggctttggggctcaaggagctctatttctccctgatttgaccccactccccctcctggcctccagaccccttcctccagccctccttccactctgccactcaatgctccaactgcaacatgggcctcccctgctctaacgccacccatggctcccttctcccaggccaaggtccagcttctcagcctggcatccatggcccggcctgagtgctcctggcgtgcacctccctcccaccctgaccccagccctgcgggagcacctcagagcatggcccggcccctgaccctcatctgggggtgccctcagcaggagatggagacagccctgagggcagacaaatcccagcttctgctctacatggctgcctgcagggaagtgccttctcaagcatcggttcccccatctgtgagtgacgtcactgttgcccgcctgtagggttgctgggaacacatgggcagggcgcccacctacacggggctgctgggcacccaagcactcagacggcagccctgccccttcccagtccgcctgcctgccttcgtctcctgagtgacccaccagcgtggggcagggcgtcgggccggctccctgtctcctccgggcaccagctcaggccggggcaggctgactcatgcgtaggagagtgggcagggcggtaactccacgctgcggctgctatttatagctcccaggccaggctgtgggccgcgtgagccggcgaggccaggccctgttcccctcctcgctgtccctgaggaacggggtctccacacatggcccgcggtgcccaggccacagatggcagtgagctcttccgagcacccaaactaggacagcaggagcttctcccccatggtgggccggggagcagagggttccgcctggcctttgtgagtgggggtgggtgggcgccccagctctgcctctccatggaaaggtccgtgatccaaatctcaggggccagggcacttgcacactggggcactgagcaagccggggctggcactggagtttcctgggttccctgctgcctctcatacccgagtccctctttggagagtccctcggcatcctgagaggcacagaggtgggcgaggaggactgaggccggctgcatctttgccaaagagaagaggacctgtcaacctctccagctcgcgagctgggcaggatccacaggcgtccacgttgagtccccagggtgaaacccaccggggcagtctgcatgggtcctgcaaacacaaagtgccagtgtagtgggtgctgggccctcagcagtctgtacaaggccactgtccctgctcccatctggaaactgctgctcagagaagggaagcggctcgcccacggtggcctagtgggaaagaggtcggtccggatccatcaggctctgaagccatagcccagcctgctggggatagacggccacccccttgtgatcctcttgccctgtccctggctatctgcagtcttgtcctggggacactcggccggtcctgccttacagatctcctttcagcagaacagcaagggacggcgttcatctgcaatgtccagctcctcccccggccctgcagctccacgaccgctctcctcaccctgctgccctgaccagggccacgtgggcctcactgagccccggctagcctttggagaggagggcagtggggtccggcctcagctctcttcagtggtctctggaccatgtgggcaaagccgaggttgcacatcctggcctcagggggcagagtcaccccaggggctcagccacacagttgcttttcaagtttagcatctgtcaatcaatcagtcaatcaatctaccacctatctatctatcatctatcaatcatctatctgtcatctatcaattaatctatcaatcatcatttattaatcatttacctattatctatcaatcatctgtcacctgttcatctattatctattaatcatctacttatctatctatctatcgagacagggtctcactccgccacctaagctggagtgcgtggtgaggtcgcagatcactgcagccttgactttctgggctcgagcaatccttcctcctcagccgcctgagtagctgggactacaggcacacaccaccaggcccggctaattttaaaaaatttttctcggccgggcacgatggctcatgcctgtaatccctgcactttgggaggctgaggtgggtggatcacacgaggtcaggagttcaagaccagcctggccaacatggtaaaaccccgtctctactaaaattataaaaaatgagcccaatgtggtgacatgcacctgtaatcccagctacttgggaggctgaggcaggataatcacttgaacttgggaggcggaggttgcagtgagctgagatcacaccactgtactccagcctgggcaacagagcaagactctgacttaaaaaaaaaaaaaattctcgagaccatcctggctaacaaggtgaaaccccgtctctactaaaaatacaaaaaattagccgggcgcggtggcgggcgcctgtagtcccagctactcgggaggctgaggcaggagaatggcgtgaacccgggaagcggagcttgcagtgagccgagattgcgccactgcagtccgcagtccggcctgggcgacagagcgagactccgtctcaaaaaaaaaaaaaaaaaaaaaaaaaaaaaattctgggctgggcgcagtggcttacgcctgtaatcccagcactttgggaggctgaggtgggcagatcatgaggtcaggagtttgagaccagcctaaccaatatggtgaaaccccgtctctactaaaaatacaaaaattagccaggagtggtggcaggcgcctgtaaacccagctactcaggaggcccaggcaggagaatcgcttgaacccaggaggcacaggtcacagtgagccgagatcgtgctattgtactccagcctgggcgacagagcaagactctgtcccaaaagaaaaaaaaaattctgtagagataaggtcttactatactgcccaggctggtggcatcaatattttaaaatacagagaccatttgtcaaaaaccagtttgccttcaaagatgaacaggctgacatccccaagcccatttctttttcgtttgtttgtttgtttttgccctttggcatctgcagagctgctcgccgctgctcccccagcccccaggccaccatggaagacccacgcctcacgctgcctggcccctagagtcagcattgggttcctctctaacatcagggggctatgattttttgtgtttgtttttagacagagtctcgctctgtcacccagactggagtgcagtggtgtgatcttggctcactgcaacctccacctcccgggttcaagcaactcccctgcctcagcctcccaagtagctgggattacaggcgcccaccgccacacccggctaatttttatacttttagtagagatggagtttcaccatgttgcccaggctggtctggaactcctgacctcaggtgatccgtccgcctcggcctcccaaagagctgggatgacaggcgtgagccaccgcgcctggccagggtgctgtttcatcaccacctctaaggagtggggttactgaatctttagcattggcaggataaactccggtaacgcctgggtcttcttagagagaagaagccactctgatcatcagagaaaaaaggctgagaactacagaggccccagggcctttgcacatgctgctgcctcagccagatgagctctctctcccccatctccttctcactcacttcctccagtccccctcacgtcaccccagagactgctcctgaggagaccacagaactaaaatcatctccttttgctgtctctcaccgtgtcctgattcttttcagggcctttattgctacctggtaccgcctaacatgctggcgtcggctccctctccagaatgtgagccgccttagttctggggcagcagttcccacgggggggggggggggggtgattgtgtcccaaggggagactgggcactagatgggaacgtctgtggttctcacagctgtgggtgcacctggcatggagtgggtggaggccagggatactgctcagcaccctgcagtgcccaggacagccccgccccagagaactatctggccccagtgtccacagtgcccacagggagagaccctggaggggtccatgggtctcaaactttgcccaccccagcatggccagcgttgcctgggaactcggtggcatgcaagttctcaggcctcaccccagagccagggctgcagctcagcttcccacaaggcacaggatggccccagatgtccacaaagcccaggcacagaagcctgttctgggggccagctcatctagcctgagtctggctggacctccactagctgagacggaagcccagccagcccgctcacctcttcctggagaagcccgacgcagcgcccgccactccctcccctccgtgtgcagctccccggctctaaagcactcacttgtctaacccgattctcaccctacaagaccgcaaccggccatcacttctgccctccgccaggacaccgaggccagctgtgtcactgccccgaggggttgcaggtgcagagccgcagaggcctgaggggtggcagggagagaggtgggggcatcttcccactccagccccgtctggcctcagcacctgacagccaggagaagagttctggggtcttccagacaagcccccacgtcctgcagcagcctgtgctccctcgaaagggagatgactcctctaccttcaggagcctccgcctccttcccacctgcagggggaccctggaaaggctggggcagcctccgagcatcgaggtgaaggccgaggagtctttattggtgacaggctgctcaccggctgtcccaaaagcagacacagctcagggcacaagctgcgtgcaggctggcggctggaacaggtgggaggcagccccctctcttcccggtggggcagagggtccagagctgctggccaggacagtctgatggtgccaagggctgggagacaccgtcccatccaccaccgacctccccgtcccgccccgagctaataacttgtgcaacagaaatgcagacaacagacacgtagggccaacaggctgttattacggctgactcaaccccgcaggcctgggcgctgcctcatcattttctccccttttgtctccggatccaggtgagggaatccagtgatgccatccagctgtccatgctgagaacccaacgaggggcttccttcccgctggagcccacgcctgcgcccagcggggaccccgagctcaagtcccggagttaattctccagcttgcagagctgagagacgcccccatcctggcccactctctctgccccaatagaaaaacctggacccacctggggtctaggcaaggctgctgggtctgtttccggtggggcagcagctgagcctgacctgggtccctcccgcctgtgacctgcctggtcatagacaagagaagcccctggccaggcactggcctaggggtggccgtgacccagccaggagtgctgcattcggacgaagatggcactgggtgctctgcgcttggagttttggttttttgtgtgtgtttttgagaccaagtcttgctctgtcgcccaggctggagtgcagtagtgcaatctcggctcactgcaacctctgcctcccgggttcaagcgattctcctgcctcggcctcccaagttgctgggattacaggcacctgcgtccacacccagctaatttttgtatttttagtagagacggggtttcgccatgttagtcaggctggtctccaacttgtgggctcaagtaatctgcccgcctcagcctcccaaagtgctgggattataggcgtgagcccctgctccgggccggagttttgttttttaaacaggaagctgtcttgtgttatccaggaacaatctgtccaagctattcccggtctctaccagcgcatgaaacggttggcaggtgccccctctcctccctgtgtctctctcatgaacaggtggttgacatagaccaccatcacctgtcctgggtcttctgtgagttgggctgggtgtctccccctgggccctgtggacattgggactgaaccgttctcaagggtggggccgtcctgggcactgcagggtgccgagcagcatccctggcctccacccactccatgccaggagctcccctagtcaagacaaccacagatgtccccagacatggcccggtgtcccctgggggcagaagatccccggctgggagtcacagagtcagtaaaagagacccccaaggaggaggacccttggcttctgcaggtcacgtgacatttctgtgactcaaagttgtgtagagatggaggcggccatgtgcagctggagctggcctgctctgcagtgtcgtgacgtcgttttgaggcaggagtagtctgtggctgcaggcagtgacaaacccaggcttcctcaagcagtggctcctagcattgggtgacagtgtgtctgtgggcagagccagaggagacagagtcgctgggctgcctcacaggagcctggtctaggccggacccggccgccgtcggccaagggaccttgggaatgagccctgcgcctctggactctatatcggatgggcgagacgaccactccacgtctttaccccaacatggacatgtgctgggttcctcctcaaaagcgggtaaagcccccaggcgcggtggctcacgcctgtaatcccagcactgtgggaggctgaggtgggtagatcacctgagctcaagagtttgagaccagcctgaccaacacggtgaaaccccgtctctactaaaaatacaaaattagccgagcgtggtgccgggcacctatggtccctgctactcaggaggccgaggcaggagaatcacttgaatccgggagcagaggttgcagtgagccgagatcatgccactgcactccagcctgggagacagagcgaaactccatctcaaaaaaaaaaaaaaaaaagtgggccgggcacagtggctcacacgtgtaatcccagcactttgggaggccgaggccagcggatcacaaggtcaggagttcgagaccaacctggccaccatggtgaaaccccgtctctactaaaaatacaaaaattagctggccgtggtggtgcgcgcctgtaatcccagctacttgggaggctgaggcaggagaattgtttgaagccgggaggtggagattgcagtaagccgagatcgcgccactgcactccagcctgggcgacagagcgaggctctatctcaaaaaagaaaaaagagtggtgacagccgaccaaaagtggctcaagagacatccttctgccttagggtcccgctggccccaggaaagctcctttcgtgcctcctgaggactctgggacggagaggtctggaggccacagccagctcgcccccgcccccgcctacgtcctgctttctggccgctgcctctggtctgctgcagtcaaaggagcagggccagccctgagctcccacccagcgccagtgggggacaacgtggtgtcagaggctcctctagagggaaggcgaagaagccgcttgggatccttggggtggggtggctgggcctgcaggggtcgacagcttgggtccctcgggccaccctggggagctgatggctggtggagggtagggccccactttgtgcttcctgctgtgatgggcgaaggtggatggggatccctggagcagccggtgctccgccccatgtgggctcctgcgggattcgggggacagggactctgagccttcccatgtggggggcctggatgtctctatcccctggcagtcacgaaaactcaagccacatcccccaccagtgcagggacccagtggcttcacaacccacccacctgggataaaggacaaatggcccaggtggggtgaagccaggggagggacgggcagaaccacgtcaggttcaggacactgcgaagctcctatacccctggggccagggccaggctgcacagggttcagagatggatccccggtaagaggttcagacacaggttcccagaacaggccccaagcttccaacagcagtggggtaaggacctcctggagtggaagttggggggtctcaggagcagaggctgaaccccgggttacttatagaccccctaaagtggaagttggggggtctcaggagcaggggctgaaccccaggttacttacagaccccctggagtggaagttggggggtctcaggagcagaggtggaaccctgggttacgtaccgacctcctggagtggaagttggggggggtctcaggagcagaggctgaaccccaggttacttacagaccccctgaagtggaagttggcggggggtctcaggagcagaggctgaaccccagggtacttacagaccccctggagtggaagttggggggtctcaggagcagaggctgaaccccgggttacgtaccaaccccctggagtggaagttgggggggggtctcaggagcagaggtggaaccccgggttacgtaccgaccccctggagtggaagttacttacaggggctgtgtgactactccggcctcctgggacccccatggcaatgctccaggcagccaccgccctctcgaggtcgtcccttcctgtgactggcacctgggagctgagctggctgcagcagggccaccggccgggacaccccacagagcagtcactggctggccctggagctccccatctgactagattgatggactgatggataggaggccccgccaggcccaagcccacaggccagatgggcacctctccgtgcagccccccccagtcagccttgtgggtaggtgtagggaggcgtggtggcgaggcagggcacgggatgggagaagggtacctggggcctggcactcaaagatgagtgacgaggtgggaggtggggacagccagaggccctcacagccctgatggggctggaagacgccaaggcccagagatggggtccggggctccaggtcagatcaaggaaaaacccagcccaggcgggcatgcccggctcccttccgcggcgccacagcggcttcgagccaggcagagcaaaatccccgaggaaaggcgtccctccccagctctcacctccccagacccggcagggttgccgggacgacggctcaggccttccggaggttgccacagagccaggagcccagggctgccccagcccacgcccggctgctcgtcccccgtgctcctgccctctcgggagcagcgtccctgtgtccacgggagggatcgcaccgcggggcccctgccccaccgctagtggggtccatcttcctctggagaccccggtgtgtgtaagcagagctgaggactgatctttaagctgcctcctggccctgctcgtgagtctcaggaaactgtgacactcacctggcccgggggtcctggcccaggggtccccgctccaggagccacccagcaaagggaaaaggagagggcactcctgagggtacatggcccactcacagggggtacagccttgtgtggcaggagggacggagcccggctgtcccatcgcagtgactccaacctctaataagcctcaagacactcggggctcgggcggcgagatcctggcaacagagtagggtagacgttggggcctcagggcccccagctggctcctgaggcacaggcggcgcggccctcactctggccacagcagccaaatgctcccgtccttattcacaggctgggggtgtgcggcagggagaggagggtcctgaccgatctcaccgggacccaggtcctggccctcccgcccgtgggttgccacaccccacggcccgaggttgacatggccacacagctttggtaaagacttttaagagaaagaagtattttaaaaagtagcagtgctctgaggctcagggtgtaggatcgggggcacagcctggtcccgggaggccccttgtgcacaggtggtggcccagggccacagtgctcgctcttgggggacgcgcggccgggggacgcggcctgtgtccggcccggggctcccggcgggctccggcggcagggacaatggcgaggccgctcaccacttgaggaagaccatcccggccaggacggtgtagcccagcaccaggaagaggaccttgagcagacggtcactcttctcctccagctccttggccaggatctccaggaaggtgatgaagaggaaggtgccgcccgccaggccctgcagcagcacggacgccacgctgcccggcacgccctgggcgctctcaatgcccaggcccaggccgatgcccagggggatcatggcgcttacggtgaccgccagcttggccgcgtcccgcaggggcatggcactccgggccatgctgatgcccagggccacggccaccagtgtctcgtggacggccacccccacgaacaggctcaccactttctccccctcctcctgcaggcccagggccaggccctcaaagaccgagtgggccgacagcgcgaaggccaggctgagcaggcgcacggggctggcgcgcgagaggccctgcacgctcaggctggggccgtggccgtggggctccacgtacagcgcgtggccccgcgcgccccccatgaaggggctctcatactccgagtcgctgcccacgtccgatccggcgttgaaggtctccaggtcgatgaaggacggcttctccttgcggaaggtcaggatcagctgctccaggaagacggtcatgaagaagcccagcaggaggatggtttcggccagcgggtagtcggtgctgatgtggccgaggctcaggaccttctggagctgcagccggggacacccgagagagagagagagacccacgctcaggggtggcggcgacagggctggccagatgtcaccgttcaaagcaaagtccagaaatccccgattcacacagaggttaaaacaagtgggagaggaagggctcgcctgtgatgaattaacaccaccaccaccagccaagcgcggtggctcatgcctgtgaccccagcattttgggagactgaggctggcggattgcttgagcccaggagttcgagaccagcctggccaatatggggaaacatgtttctactaaaaatacaaaaattagctgggcatggtggcgagcacctgtaatcccagctactcaggaggctgaggcaggagaatggcttgaacccaggaggcagaggttgcagtgagacgagatcgtgccactgcactccagcctgggcgacagagggagactccggctcaaaataaacacataaagagctgcactggccttgcgtgttctgccgcggggcctcctctctgcttccctgaccgacatgcctgggcccgactctcctcctggtcagggctctcctagcgaggggagactttggtggggagaaactagacgtgggtcagacgggagccgcagggcgtctgcaagaggtacacactcctatgggagggacagctgctcacggggcggacacgcaggcattaggctatgcgccaggatgaaatgtctcatgaaaggcaggctgtaaacgcccacaacagctccctggagcctcgtcacggcagggccagagttcacagccaccctccagagagacctcgagaccaaagtggaggaaaatcacaacacaatcgacactcaacaatgcctgcttccctgcttccttcccagcggagacttcattacaacctgcgcacgtgcacacacacacacacacacgcatatgtgcacacacgcacgcacacacacgcgcacacgcaggtgcacacacaagcacgcgcacacagtggttctcaaccagggcgattctgcccgtgtggacacctggcaatgtctggaaacattttttattttcacaactcgggtagggggaaggtgctgacattcggggctggattgttctctgggacggggccgtcctgggcactgcagggtgctgctgagcagtgtctctggcctccacccactccaggccaggagcaccccccatcgtgacaaccacaatgtccccaggcatcgcccagtgttccctgggggcagttcacgctgggtgagcctctgctgcagcagaaggctgtgtttccacggagaagccacttaactccctcactgaccaccggctggaggcctcatgcatgcctcgcttgaggacaagctcatgaggaactctagctactcccaagagacagacgttgatcaggagagatgaggcagatgcacgggagctgtgaaccaggcaccattttccaggggtgactgagagcctggccctgcagtgggtgaggctgggggctcgggagtagggacctcatccgcctgaccagcccgaggacaggagaacggcgggaaaggtttgggtgccatgagaaggccactgtgatgagggggagggaagagcaagctccccgcagtcgcccaggcctgcagtcagagggtgacgggggtgacaccatgaccatgggggaaaaggggggctggcagtggcctctgcgatgcaggagatgtcagagatgaccaagatctccatcctcgcagtgcagatgtcagtcttcacacaccgcgtaacgaacgaatgcagactcagccacgcggaacagcaggaatgcggtgtctcggctctgaacggtggaaatccaggtgcgggctagctgggccctacgctccaggtctcgcagggtgtcatcagggctgagatctcactgacacccagggtcctcttccaagctcactggaggtcggaagagtccacctcctggtggctgtggactgaggccccgtgtcctggctggctgttggcggggatggctcttggcaccgagaggctgccctcgggtcctcgcttcatgcccttctcctggcacaccctggctttttgcttctccaaggccagcaggagggtgagtggctcacctgattaggccaggcccaccccctcccttttgatgaactcagcgctaaccgatctggggcggtcatcacagctgcaacatcccctctgctgggattctgacataatggcaggagtgacacgcacggcagtcccagccctacccacactcgaggggagggaagagcatggggcgtgcggagcaggggctggaagctcagggagccaccctggaactctactctgccacactaacaggctcagatgatttaatcccagacaacagcccttctcctcctttctggacactaggcacgaggaaaagcagggccaggggttgggggataagcttagggcttccatgctttcgttgggaggaagaacagggggtcctcatatctccaccaagtatgtaaccaacacaaattcaatgtcacatctggcactggcccagagagaggaagccactcacccagggtcacccagcaagcatggccagggctggtcacactgtggcctgacaggggacccacactctgggctgctgatatgggggagctcaaggaacaggtcagcagaggatgatgctgtcaggagttggggtggacagactccaagatggccccagaagcccctgcctcttgacagccataccctgtgaggtcctggccacttgagtatgggaaggacttgaacttgcttctaaccagcaggacactggggcagaggggaagggataccctgtcacctctgcatgacatgggactgtgccctctgtcttacacagagtcatggccatcttctccatttgctgatgaaggaactgatcatgctggggaggtccacgtggccaggctctgagggctgccccagccaacagacactgacaaacagacaccttcggtctgacaaccaatgaggaactgaacctggcttacaaccacatgagcttagaggccgacccatccccggttgaacgttgagatgagaccacagcccaggagacactgtgactgctgccttgtgagctcctgaagcagtgcccagacccctgactcacagaaactgtgagatgataaacgtctgtagtcctaaggtgctcagtttgctataatttgttacgcaacagtagctgactgatataggaaccgaagagaggccatgctttccagcttcaggacagagtgtgccctacctaggtgggtagtctggtctgattatcaggtgacaaccgacaagtccacctgttgggaatcccaggtctggtccaaaccccttgtttggccggtagagcacagagacagaaagtaaccagttcacaatcacacagcaaattcacttcctactttccgtcacccttacagcatcaaggccttcactgaacttggcatcagtgttgaaaatgcatcagagtcccttggccataaggtgccaagggctgctgctagtgcccagggagcccttaccttttccctcacagcgggcagcagagcgttgaagcacgtggccagaaacacccctcctccaaaggtgttgcagagagagaggatctttttcgagcgatgggccttctcaaaatctgtctcgatgatcttcacggggagcagggagccgagcagcatgaagaagaacacgcccaccatgcacaggattttggccactagcaatttcaccatggtggcggcttgggctgctctggtcactgcagggccaaaccatctgtgggcgcacacccaagtcccacgatgtgctaccgagcccaaccacacagttggaggctcatgtctcagtccagcaactgtgaacatcaggggcactgcattagctttctttcttttttctttttttttttttagacagagtctcgctctgttgccaggctggagtgcaatggtgcaatctccgctcactgcaacctccgcttcctggattcaagcaattctcctgcctagtagctgggattacagacacgcgccaccactcccagctaattttttttgtatttgtagtagagacgaggtttcatcatgttggccaggctggtctcgaactcctgacctcgtgatccgcctgcctcggcctcccaaagtgctaggattataggcgtgagccactgcacctggccagttcttcagttttggaactcggactggctctctttgctcctcaatctgcagacaatgtattgtgagaccctgtaatcgtgtgcaattaatacttaataaacttccctttatatatataactattccattagttctgtccctctagagaaccctgactaatacactgtctcaaaaaaagaaaaaagttcatcaaaattaaaaaaaatccaggctgggtgtagtggctcacacctgcaatcccagaactttgggaggccgaggtgggtggatcacctgaggtcaggaattcgagaccagcctggacaacatggtgaaacgccgtctctaccaaaaatacaaaaattagccggccgtggtggcaggcacctgtaatcccagctactctggaggctgaggcaagagaatcgcttgaacccaggaggcagaggttgcagtgagccaagatggcaccaccgcactccaggctgggcaacaagagcaaaactccatctcaaaaaaaaaaaaaaaaaaaaactaaataaaatacaaaattccgctcctcagtctccctggccatatttcaagcgctcagtagtcacacaagcctacttgacttctgtggttaccgtatttgacagcaaagggaacactctcatcactgcagaacatgctattggatggtggtggtccatggcttccccatgccccgaaataaagtctaaactctgtaccctgaggctgaagctctgcatgacaagctcctgcctcgcctcggccctcactggtcctttctgtgccaagcttgctcgtgcctcaggacctctgcatgggttctcctctctccacctggaacactgctctctttcccctgaccttccagcgaggcctccttcttctttcttgcttctctgcatccaggacccctcaaaagggcctccctcggttgggagtggtggctcacacctgtaatctcagcactttgggaggctgaggtgggcagatcacctgaggtcgagagttcgagaccagcacctgaggtcgagagttcaagaccagcctggccaacacagtgaaacactgtctctactaaaaatacaaaaattagctgggtgtggtagtgggcacctgtaatcccagctacttgggaggctgaggcaggagaatcacttgaacccaggaggtggaggttgcagtgagccaagatcaagccattgcactccagcctgggtgacagagtaagactctgtctcaaaaaaaaaaaaaattagctgggcatggtggtacgtgcctgtaatcccagttactcgggaggctgaggcaggagaattgcttcaacccaggaggtggagcttgcagtgagccgagatcgcgccattgtactccagcctgggctgcagagcaagactccgtctcaaaaaaaaaaaaaaaaaaaaaaaaagggcctccctctctgcccctggctgactcctgccctaaaccatatccctgtacccgccggaaggcctgctgcagaacagatactcaaaaaccgctggctgaacacatggacgaggggaagcgtgtggccactgataagggccgcattttacctgatgcaatgggccaaagtgaagtcggtttcaccctggaccccaaaatgtcaccgttcttaggaggaatctcagctcctcccctgtccttgagttttccccaactgggttttctcccccaccatcagccccaagcgcctcatggccccgctacctcactgcattcaggtcttcgggtcactgctcagatgtctccactcagagctctccccgcccccttccctggtgttattttcttttattttgtgctacagagggagctaggaattacattattttaagtcatttaaagtcgtccctcccccccggcggtgagctgggcgggaccaggctgtctgtcttgctcagggccagctgcacccagcgcagagccacccaggcacacagtaggcgcccaataaagacctgtccggcatctggatacctcagtctgtacagtgaaggtgagggtggcctgcacgctctcaaaccggaggctgctcgggccgggatgaggagggcacgggctcattcattcaatcagcacttattgagcgccttctgtgtgcctcgcgctaccgggcaccggagacgggcctcggctaacgtgcgggtagagtccaacagacccccggccgctcagcgccgccccgccccgccgccccaggtcctctctctgcccgcacctacctcccgggggcccctcgtccgccgactggcgccgctgcacgcccaacggccgcgcagtctcgaccccacagacgcggcccggagaggccccgctcggcgcggctggtccacgccccgcccacgcccctgcccattggcctccccgagacccgctggcagaactttccatactattggctgcgaaacctgccactcatatgcgactccacctctcctaccggcacaggaaaggggtttcctcccgctgagcggcgggcgcagccaccaagcggccccggcgggaaacccggattggcgaggaacggttccggcagggttgggtttccagagctgtccaggggcgcctggtgctgaatcccgcttggaaagaggcttggaggtggatgggaagggatttccaacggaggcggctcctctctcagcgtcctcgctgctgatccccttaccgacggctgaagaagcagattcatcccttcaacaaatctctgttgataggcaggaggagtaagtccaagagatcgactgtacatcatggtggctacagctcgtaacaatgcattgcatactgcaaaattgctaagaaagtagatgttacatgttcaaaccatgaaaaaataagtataggaggtaacgcgtaagttaaaaaccaaatcttggcagggcgcagtggctcacacttgtaatctcagcactttaagagaccgaggcgggaggatcgcttgagtccaggagttcaaggccagcctgggcagcatagtgagaccccatctctaaaaaaaaaaaaaaggttttttttgagacagagtctcgctcttgtcactcaggctggagtgcaatggcgcgatcttggctcactgcaacttccgactcccgtgttcaagcgattctcctgcctcagcctcccgagtagctgggattataggcgtgtgccactatgccggctaatttttgtgtttttagtagagacggggtttcaccatgttggccaggctggtcttgaactcctgacctcaggtgatcctcttaccttggcctcccaaagtgctgggattacaggcatgagccactgcgcttggcctgatgacttgattctaacaaatagaaaatggcaaatgaatgggatgtcattctgcgattaggctatgagagattgtgacttctgttttgccagcagagcctgtctctcgccttctcagcctacgtgtcttgacaaagcaagctaagatgctggagagatccagagggaaaggaactgagggtgtcctccagccaacagtcagcaaggcaatgagaccctcagcacaagcgtccataaggaaccaaatgctaccaacagccatgaacgtgatcatggaagagggtcctgccccagttgagcctttggatgactgcttcacttcaattgcagcctttgaaacaccctaaaacagggctgcatgtggtagctcatgcctataatcccagcactttggaaggccgaggtaggcaggtcacttaaagtcaggagtttgagactagcctggccaacacggcaaaaccccatctctactaaaaataccaaaattagccaggcatggtggcgggcacctgtagtcccagctactaaggaggctgaggcatcagaatcacttggacccaggaggcagaggtgacagcgagctgaaatcattaccattacactccagcctgggcaacagagtgagaccctgtctcaaaagaaaaaaaaagaagaagaagaagaagaaagaaagaaaaacaaagaccctgaaaacagaagacccatatgaactgcatctgaattcctcacccacagaaactgagataacacatgctgttctagccacttagttttgtgtttgtttgcttgtattttgagacagggtcctgccccatcacccaggctggagtgcagtggtgcaatcacagctcactgcagccatgacctcctgggctcaagcagtcctcccacctcagcctcccgagtagctgggagcatgtgccaccatgcccagctaattttttacctaatgtcacacaggccagtcttgaactcctggattcaggaaaccctcccacctcagcctcccaaagtgctgagattacaggcatgagccacaatgcctgctggcactaagtttgggggaaaatttgtcatatggcagtaggtaactaatacacatacatactagaaaaactataggttgtactaagttctgtgaagaaagaatgagagagacttctgtgcaggaattagccaagtcaaatgtactgagaaggccaggtgtggtggctcacacctataatcccagcactttgggaggctgaggtgggtggatcacttgaggtcaggagttcaagaccagcctggccaacatggtgaaaccctgtctgtaccaaaaatataaaaattagcagggcgtggtggtgggcgcctgtaatcccagctactcgggaggctgaggtaggagaatcgcttgaacctgtgaggtggaggtcgcagtgaaccgagatcatgccactgcactccagcctgggcgacagagcaagactccgtctcaaaaaaaaaaaaaaaaaagaaaaaaaagtactgagaagtggggagagaagagaggatagttgacaaaaagatggagaagggcttgctgcatttgaggagttggaaagccagcctggctgaatgttcgtgagcagtagggagatgggagattagggacagtcccatagaccgtgctatggaacttggattttaccgtaattacagtgtgattcattgaaggattttaagtaggtgaaggttgtcatctaattttaattcttaagattattttgactcgtgtgtaaagaaaggctgaattatagagaagcaagaatggaagcagggagactacttcagagccctctgggcaagagttgggctgggtgccttggcgcacacctgtaatcctagcacattgggaagccattgcaggaagatcgcttgagcccaggagttcgagaccagcctgggcaacatagtgagaccctatctctatttctaagaaaagacttgacggtagtttagctgagggcattgacaggagaaaggacagtgggtgaatttgagaaatattttggagggtgaattgacaggacttagcactggtttgtctgtgtgggttgcaggagaaggaggtgttgggggtgacttctggttttctgctttgagccatccgatggattctggtgctcactaaaataggaaagactggaggaggcacagagattgaaagcgtcaaaagacagagttcagtttcacagaggctataaatgagacatctacaagttcttagcatttaatgccattttctgcctgcgtggcgctgatgtcatcatgtggaacacactgtttctggtagctatttttattattagatgcagagtgatctgactctgtttctgctttccataactcacgacaagaaaaagatggcttgtaacataagcacaccaggtagacgccacaggacgactccttcctaaggggaattcatagcatgcgatatttattcataattgtttggagaatcagcctgctcagggaaagagctacgtaagctttgggctttgattcattcagtacgtgtttttgaaaacctcctgtgcaccagaagccatgtaggagcagatgtcttcagagcgcaacagaaaaaaaatactaataaaatataaaataacataaaagcagcacagtggtgcatacctataatcccagcactttgggaggctgaggtaggaggatctcttgagcccaggagttggagacaagcctgggcaagatgatgagaccctatctctataaaaaaaaaatactgacaaattgactgacttcagtatttcaaaaatcttccatagtaaaaaacaccatgaatgggcttaatagacaagtgacagactgggagaaaaatgttgatactatatgagacagagcccttgatagaaaatagaaaataaacatcttaaaataaaaataggaagggtgatgaatgagcaattcacaggggaaccaatataagaggtgaataaatataagaaaagagtctcaatccatgaagataatcatgaaaatacaaaataaaacaaggggccaggcacggtggctcacacctataatcccagtactttgggaggctgaggcaagaggataacttgagccctggagttcaagaccagcctgagcaacatagtgaaaccctgtctcttcaaaagaaaaaaataaaaaataaaaaataaattaatcacccaggtgtggtgacacatgcctgtcaccccagctactgggaggagggaggattgcttgagcccaggagatcaaggccacagtgagctatgatcatgccactgacctccagcctgggcaacagagcaagtccctgtctcaaaaacccaaaacaaacaaacaacaacatcaaaacaacaacaaaaacggctgggcaaggtggctcacgcctgtaatctcagtgctgtaggaggccaaggcaggcggatcacttgaggtcaggagtttgagaccagcctgaccaacgtggtaaaaccctgtctctactaaaaatacaaaaattagctgtacctgtaataccagctaggtgggagaatcacttgaacccagggggcagaggttgcagtgagctgagattggtccactgcactccagtctggcaacaagagcaaaactccacttcaaaaacaaaaacaaaaaaaacagagaaaaaattgaaaaaatctgaatgtagactgtttattaaataatcatgtcaatattcagtaatgtttaatttcctgaatttaacaattatactgtatttatgtaatagaatgtccttgttcttaggagatacaaaatacatgatgtctggaactttcatttgaattgttcggcaaaaaaataataattattatacatatacacacacataagaagagaaaaaaggaaatttggtaaaatgtgaagaataagtgaatctaggtgaagagcataagaaaattcactgaaagccgggcgcagtggctcacgcctatcatcccagggaggccgaggggggtggatcacctgaggtcaggggttcaagcccagcctgggcaacgtggagaaaccccgtctgtactaaaaatacaaaaattagccaggcgtggtggcatgcacctgtaatcccagctactcaggaggctgaggcaggagaatcactgaacctgggaggcggaggttgtggtgagctgagatcacgccattgtactccagcctgggcaacaagagcaaactccatctccagaaaaaaagaaagaaaagaaggaaggaaggaaggaaattcattgaaatataaacgtggattttttgttttggtttggtttggtttttggtttttgggggctttttttggagacggagtctcactcttattgcccaggctggagtgcagtggtgcagtcttggctcactgcaacctccacttcccaggttcaagtgattctcgtgcctcagtctcccaagtatctgggactacaggtgcctaccaccatgccctgctaattttttgtatttttagtagaaacaggatttctccatattggccaggctggtctcgaactcctgacctcaagtgatccgcccgcctcagcctcccaaagtgctgggatgacaggcatgagccaccgcatccggcctcacatgacatttcattatcacatcttcttaggctcctcctggctgtcacagtttctcagatgttccttgtttctcatgatctggacagttttgaggaggacgggtcagatattttgtggaatatttcttgactggggtttcctgatagttttctcatcgttggactagagctgtgtttctgttgtttgtttttgaggaagactatagaagtgagaggccatccccatcacatcacatcatagcaaagcccatgcagtcaacatgacttaccactgttgacactgactgggtcacctggctgacatagtagttgtcaggtttttctactgtaaagatccttattctttttttgttttcttttttttttttttttttttgagatggagtctccctctgtagcccaggctggagttcaatggcatgatctcagctcactgcaacctccacctccctggttcaagcaattctcctgcctcagtctcccaagtagatgggattataggcgcccgccaccatgcctggctacttttcgtatttttagtagagatggggtttcaccatgttggccaggctggagttttaccgtgtcgcttaggctggtgttgaactcctggtctcaagtgatcgtcctgactcagcctctgaaagtgctgagattacaggcatgagccaccaagcccagccaattattttgtgtgtgtagagacagactcttcccatgttgctcaggctggtcttgaactcctggattcaagcaatccatccgcctcagcctcccaaatagctgggactataggtgcgtatcaccacacctggctaacacttgtttttcaggtccttcaacttgagctatcctggtgtagttgtttgctactatggtttttttgtttgttactatggtttttttgtttgtttgtttgtttgttttttgagatggagtctcactctgtcgcccaggctggagtgcagtggtgggatctcagctcactgcaacctccgcctcccaggttcactccattcccctgcctcagcctctcgagtagctgggactacaggtgcctgccaccacgcccggctaattttttgtattttagtagagatgaggtttcaccgtgttagccaggatggtctcgatctcctgacctcgtgatccgcccacctcggcctcccaaagtgctgggattacaggcgtgagccaccgcgcccggcggctactatggatttagttagtgttctcctgatgtctaatgacattgagctcttttcctcatacttatgggccatttgcctatcctgttttttggaatgtctaagtgttttgcccattaagagaattgggtcatctctcttctcactgatttgtaggagtacttgatatttttataaagtacatattgcaaatgtcttcacccactcaatggctcaatttatccctctattttgatggcatcattattttaatgaagtctaattgttgattaaaaaaaaaaaaacttggccaggtgcagtggctcacacctgtaatcccagcactttgggaggccgaggtgggcggatcacctgaggttgggagttcgagaccagcctgaccaacatggagaaaccccgtctctactaaaaatacaaaattagccgggcgtggtggcaggtgcctgtagtcccagctacttgggaggctgaggcaggagaattgcttgaacccgggaggcagaggttgtggtgagccgagatctcgccactgcattccagcctgggtaacaagagtgaaactctgtctcaaaacaaaaacaaaaacaaaaacaaaaacaaaaaaaaactttatggttagcgctttttgctttctaagaaaattttgcctaccccaaaatagactctatattttcttctgaaacccttgtggctttaccttttgcagattgtatttgtataactctcaaaaacaggcagcacccacccatggtatcaaacgctaggtcagtgtcaccctctggggaggcagtgagtagcgggagtgtggggggactgggaggcagtgagtagcgggaatgtgggggcactgcttaggtttggtttcttggtgtaggtgccaatgatatgggcgtgttcccctcatgaaaattcatcatgatgtttgcttcttttgagacagagtctcgctcttgtcacccaggctggagtgcagtggcatgatctcggctcactgcaacctccgcctcctgggttcaagcaattctcctgcctcagcctcccgagtagctgagattacaggtacccaccaccacgcccggctaattttggtattttttagtagaaatggggtttcgccatgttagccaggctggtctcgaactcctgacctcaggtgatccacctgcctcggcctcccaaactgctgggattataggtgtgagccacagcaccccacccatgatgtttgcttatcattcacactttggtgtaggtatgttacacttgcattaagtctttaaaatgcctgtagtcccagctactcaggaggctgaagtaagaggatcacttgagcccaggagtccaaggctgctgtgagctatgatggcgccactgcactccagcctggggaacctatctcttaaagaaaaaaagaagaaggagaaggagaagaaggagaagcctggcacagtggctcacacctgtaatcccaactttgggaggccaaggcgggagcatcgcttaagatcaagagtttgagaccagcctgggcaacacagcaagaccctatctctagaaaaaaaaagtatccaggcatgatggcacatgcctctagtcctggctactcaggaggctgagggaggattgcttgagcccaggaggtcgaggctgcgatgagctgtgactgcaccactgctctccagcctggaaagaagacacacagaaagagagaccttgtctcaaaaataaataaaaactggctaagcacagtggctcacgcctgtattcccagcactttaggaggccgagacaggtggatcacctgaggccaggagtttgagaccatcctggccaacatggagaaaccccgtctctactataaatacaaaaaaaaaaaaaaatagccagacatggtggtgtgtgactgtagtcccacctactctggaggctgagacatgagaatcacttgaactcaggaggcagaggttgcagtgagccaagatcgtggcactgtgctctagcctgggcgacagagcaagattctgtctcaaaaaaacaaaaattaaaattaaaaaataataaataagtaaataaaaatgtataaaggttgaaaaagcaccattaacgaaagagagggagacagaggaacggggctccccaagtctacctgggcttggcaagaattcgggaccaccgtgagctgatgagaatttctggtttctggtgggcttcgcgggtcctcgcgcgcccacgctgccgggcctcatgtctttgaccctgcatcccacaggtatctcagggccagcctggctccctggtccactgcgtgcatcctcttggctccatcaaagcacgagcacccggtaggacatccctgcttcggaggatgttttctccgtgtcattctgaaaggagacccgattctaagagcaaaactctagcagcagggcggtccctaggctctggcccaggtggctgcagaaggagccacgccttgtcgatcacagccctggcagctgcggacgcacgtgggtgcccgcgggagaggccgtggctgccgcgccccctggcggctccgtgcggaatcgccccggctccccatttccgagaccacatcccggatgcttggactccaatccaatgttaattttttattatttagttatttatttagagacggagtctcactctgtcgcccaggctggagtgcagtggcacaatctcggctcactgcaacctctaactcccgagttcaagcgattctcctgtctcagcctcctgagtagctgggattacaggtgtgcaccaccacacctggctaatttcgtatttttagagatggggtttctccatgttggtgaagctggcctcgaactcctggcctgaggtgatcctcccgcctcggccttccaaagtgctgggatgacaggcgtgagccactgcgcccggcctttttattatttattttattatttttaattttattattttatttgagacagtctcactctgtcgcccaggctggagtgcaatggtgtgatctcggctcactgcaacctccgccttccagttcaagcgattctccttcctcagcctcccgaggaactgtgattacaggcacctgccaccacacccagctaatttttgtatttttagtagagatggggtttcaccatgttgaccaggttcatcttgataccatagtaaagcaggaggaaggaagggaggacccatgtacccctgaatctaaaatttaaaaacaggccggcgcggcagctcacccctgtaatcccagaaatttgggaggccgaggtgggtggatcactagaggtgaggagttcgagaccaacctggccaacgtggcaaaaccccatctctactaaaaatacaaaaaaattagccgggcatggtggtacatgcctgtaatcccagctactgtggaggctgaggcaggagaattgcttgaatccaggaggttgagcctgcagtgagctgagatcgccccactgcactccagcctgggtgacagagcgtgactctgtctcaaaaaataaataaaatttaaaaataataactaaaattagctgggcgtggtgtccatgcttgtagtcccagctacttgaaaggctgaggtgggaggatcgcttgagcccaggaggttgaggctacagtgagctatgctcacggtgctacactccagcctgggcaacagagccagaccctgtctctaaaaagaataatttgacctaagatatttttgcaagatggagaacaggatggggaaggtcactttgttttaggttttcaagttactcagtttggggtgaaatgttttccttcaaagataccgggacattccagagtcagtgacaaattatttttcctaatggcaaaacggtttgggacatggatttgacacatttatctagagagtaccatgtgtctgggcttctcctcctctgtactgtggacatttggggctgaattattctgtggggtggggccatcttgggcactgcagggtgctgagcagcgtctctggcctccacccactcaatgccaggcgcaccccccagttgtgacaaccacagatgtccgcagacatcgccctgtgtcccggggaggacaactgcgcccgttgagaagcaccaattctgcaaaagagaaaaacactatttgtttcctcctcgtggcttcctgggacttaccctggaggggtttgcaacatagtccctgctgggtcaggctttgtaggaactgcaccccaagcgtacagagaagcagagggcagagccttcctaattccacgattacacctggaggttcaacctactcctggagccctgagtcacgacttacatgaaacccaagtttaattaccgcttctttgctctgcgcatctctgacaggaatattcagaactaccctatttcaaacttgtgtgggatcaagcagccattatctatgacacgcttctcatcaagtcgcgcagagaagccactggttctgggatgagatgacagctccccctcgccacccctcctcttctccaccccttggtgattccaaaacaaactttctggaggtctctcaaaggcttgggctgggtttggggtcaactgggaagagactgtgcaggctttcctggtgatggacacgagatgggaggaaatgagccgaggtcgtctacgaagactgaagagcgtgccggctgcggctgggatacacggctcctgcaacagtgtccacaggtgtttccgggagtgggattctccaaacagaggcatcgcgatcacctgggctgcttgtctacagtgcagatccggcccggcgcggtggctcacgcctgtcatcccagcactctgggaggccaaggcgggtggatcacctgaggtcaagagttcaagacccgcctggccaacatggtgaaacccccatctctacccaaaatgcaaaaattagctgggcgtggcggcgggcacctgtaattccagctactggggaggctgaggcaggagaatcacttgaacccaggaggcagaggttgcagtgagtcaagatggcaccactgcactccagcctgggcgacagagtgagactctatctcaaaagaaaaaaaaaaaatgtaggccgggcgcggtggctcacacctgtaatcccagcactttgggaggccgaggcaggtggatcacgaggtcaggagatcgagaccatcctcactaacacggtgaaaccccgtctctactaaaaatacaaaaaattagccgggcttggtggcgggcgcctgtggtcccagctactcgggaggctgaggcaggagaagggcatgaacccaggaggcggagcttgccgtgagcggagatcgcaccactgcactccagcctgggcgacaaagccagactccgtttccaaaaaaaaaaaaaaaaaaaatgtagatacatgtgggtgggccccagttgtgtgttcatcaagctctctgggtgactcttgacacccaccaaactttaagacccagtggtccatctctgtcctgcttcgggcatgagccaccaagcccggccctgacttatttttaatttttcgagacagggtcttgctcttttgcccaggctggagtgcagtgctgtgatcatggctcactacaacctcaaactcccaggctccagtgatcctcctgcctcagcctcctgaggagctgggactacaggtgagcaccaccgtgtctggctaattttttttttggtacagatggaggctcaccatcttattttttgtttttcagacggagtttcgctcttgttgcccaggctggagtacagtggtgcgatcttgtctcactgcatcctccgcctcccaggttcaagcgattctcctgcctcagcctcccgagtagctgaggttacaggcttgcgccaccacgcccagctaatttttgtatttttagtagagacagggtttcaccatgttggccaggctagtcttgaactcctgacctcaggtgatccgtccgccttggcctcccaaagtgctgggattgcaggtgtgagccagggcgcctggcctggagtgtctgatttaggcctggggtgaggcccaagacttggtgtttctactgtgcccccaggccacgctgctgctgctgagctgaggacagtctaaaatgcatccagggttccccttctaccgccccggctctgtggacactggggccagatcattctctggagggggccgtcctgggccctgcagtgtgctaagcagcaaccctggcctccacccccaccattgcaacaaccactcacgtccccagatgctgcccagctaagtgtgccccgggggaagagccacccaggtgagaagctctgcctgagacctgaagcgcccacctgcctcccacagccaggccccttcagcactagacccagcaaccctggggtggctgttctttgaattttgtgactttttggtgtgtcatttttgggagatgacagaggtagtggctgaacctgaaacttcgcccctgcagatctcggttcttcctgctattgcaggggtggagaaggtgggtgcttgagccagggtcctgagccagagtccctgccagggctccgccaggttcagacgctcacgggtggggtgacctcgggcctgatagccaggcctcggtttctctgtctctagcatgagggtgccggtgcccaaccttggcttgtgggaaacaggaattcacagtccacgaaagcttagaggactttcagggagttgttctttcatttttatgtttttgagacgtagtctcgctctgttccccaggctggagggcaatggtgctatctcagctcacagcaacctccgtctcctgggttccagcgattctcctgcctctgcctcctgagtagctgggattacaggcacctgccaccatgcccgccaatctttttttgtatttgtagtagagatggagtttcatcatgttggccaggctggtcttgaactcctgacctcaagtgatccacccgcctcagcctcccaaagtcctgggatgacaggcttgagccaccacacctggccaagggagcagcttctatgttcacaacaaaactctgtgcagcaccctagggttggggctgagatgggcctggaagctttctgggctccttcttgcctgggactccctcactgacccattctctcaactggagccgttgtgaaagggaggtgcctttggttacagaatacagaatttatggagttacagtatgctagaaaagcaacagacaaagccaggtgcggtggctcacgcctgtaatccctgcactttggaaggctgaggcaaatcacctgaggttgggagtttgagaccagcctgaccaacatggagaaacctcgtctctactacaaatacaaaaaattagctgggcgtggtggtgcatgcctgtaatcccagctacttggaaggctgacgcaggagaatcacttgaacccgggaggtggaggttgaggtgagccgagattgcgccattgcactccagcctgggcatctagggtgaaagtctcaaaaaaaaaaaaaaagcaaagcaaagcaacagacaatacgatcactctctgctgaggaccgaggcatctcaccccaccctggggtgaccctctacaccgggatgcagctggggacggaggcggagggaagggagacagcagagggtagaggctgactgtccgaaacctcccatgacccgtgacccgtgacccaagaagtgcggctccggcgtcgcggggattcactcacaagcagcccagctgatccacaaactccgcgtcgggggttttctcgaggtttggggttggagggtatcggtggcgccaaggtcaacacgaagacagacagaggtcacaacgcctatttattccccacacgtcacgccctgcaccccgggtgggcttggcacacacctcaccgccatgagcggctgcagggccgcggcggcccccgttcctactgctacctacgatacacggtactgcgcctacctcacagacggccaggagccagggagccccaggatgctccgactgacaaccctgctgctgggaccacggcgccgtgggctcgtctgccacccccaggcctcaggaacccagacaggctgcctgctgtccggctctccggctgctttcctggtggctgttttagggccaaggtgggtggcacctgaggtgtcccgtggcctccacccagcacaggaggggtaagcttccctggggggccccgggcccatgaaacatccaggacagaaggacagcaggatgggacacagacagaaacggcccagctgccttccctgtgcccggggctaaggcggccgggacagaaggtcatgatgtcgcccctggctctcagtcgcgaggaccagaaaatgagggtgggaggaggggaaacatgtctgtcaacatgcccaactggagaaaagtcacagaaactggtcctatgcacccaggacggctcctgagccgcggaggcgtggggtgaccgcagccgtctcttaggtgtctgccactaaagagttcctcatgcaaacacacatggcccgcggtgcccaggccgcagctggcagtgagctcttccgagcaggcacagggccggggtggccgggaggtcgactcggaaagaggcttctcacagacgggagagttcctgcagacagaccacgggatggggggcgggggctgtaaaaggctttggaagccacacgatccgccacacggctgaacgtgaaacctgccacttctctgagagcggcccgggagcaccccaggattctagaaaacactcaagtgaccgagctttctgggggctggaagggaggtcgctgctggtctgtgctcagcttgctggctctcgtttcaagaagggtctgggggctgtaagggagttacaaaaagggagtggaggagggcagagataaaaggggaaaatccatcttgacatgcaggtccgaggtctctctcttcccctctctcaggcagtccaacaggaggaagtggcagacaaccagaaggcttccttcgggtcggccagggaaggacgcggtcacaccgggagcagctggaaggggacagacatgaaggctgtcagagcgcaggtggggaccaaggctgcaccacacactccaggcagcaggagaggcccagagtggacagccaggggccacagcggctatttcaacgaacgtcagagccacagctgcaccagaagcgttccacacactcggggccacgtgtggctggtggcgcagagaacatcgccatgacctagaagggtctacagtatggtggtactttgtgtatgaggttacggtggtaaaaaatccacctcaactattaaaaaaagaaaaggaaaaataaataaaagcttatttaaaaaaaaaagggaagactggaagaaaaggcggccaaaatattaatgttggtggctctgggtgagaagattaaggttgggctgaatgcacggctcacactttgggaggccgaggcgggaggatcgcttgagcccaggaggttgaggctgcagtgagacgtgactgcaccactgccctccagccggggggacagagcaggacggtctcaaaaaaaaaaaaaaaagattaagattgttcttgctgctttttaacatttttgtattttaaatttgtctacagtaattatggtttaaaaatgaaagagagtgtatatgaggaggggacaacgacaaaatgaagaggccacatgggagcagaatggaaacacctctggggaggcccggagcctcccgcccccagggagccggcgtctgctggagacagacaggactgaactcaggggagcctcccacccctgggaagccggtgtctgctggagacggacaggactgaactcaggggcccctggggaaggaaaccaagccagccacgggcccctggaacccatgggggacactgagtgtatttttaaacaactgtaagtgcaacacctgctcacagtgagaaaaggacaaaaaatccctcacaaaatgcaggcagaacgctcgggcgcagtcaaaggcaggtacccggcttgtcctttccaccactcgatgacctcgcccccacccccgaggtggcagccccgacactgcagaaacaaagagcttctgcaggcggccttaggcaggggggaccccagacaccagcccttccagggagctgtggctctcccctaatctccacccagcgccgatccacagatgggaaaggagtggggagcaggacttggtggccacctggaaaggggcccaatgcccagagatgcccccacctgcctgggcggttcagggtgatcttctgagctggatgcacccaggactcgctgtccagtgtccagacaggctccacagcccccgggcgtcactcctgctggctgccctcactgccaggcactcacgtggtgtcactcctgctggccaccccccagcccccggccccatgcactcacgcagcgtcactcctgctggtcgtcgttgctggcgctgggcgtccgactccggatctggctcctgagctgctctatcaactctgggttctgctgctgcatctgctgggcaaactgctggcccctgcggggaagggcacatggggctcagccagggccaggaggctgcctgctgcctccgtccatccccagctgacccctcgggccctccaccccaaagacaggcctgacccctcgctggaggacgctgggcccttcggagcaggggacgcagcactttcgctctcctccttcccttccgcctgcgagccctgcccgccgcccacgtcctccgtcctcttggaagcagttccactcacgcctggatgaggctggccaggtcgttctgcgaggggctggtgccgggagttcccaaggggttgttgccacccgaaatcatgccggacatgctgcaggagagagcgcgtgactcgcagccgggacagcctgaccgccacccccactgcaggccctcgcagtggcccgggagagaatccctctcagcccttcaccttcccctgcaggagaggattctctctcaccacctggtgggcctccagggcccaaacccaccctgtgactttcacctgctttcccagaacacccctctttctttggcctaaagagcgtagttctcagccagggggtgatcctgcccccagaggacccctgcaatggcagcggacatttgcaacagccatgattgggttacgccaagacaggggcagggggtgctcctggcatggagtggatggaggctagagacagtgctcagcaccctgcagtgcccaggacggccctgctccagaaactggtccagctcaaatggccacggtgctgtggctgggaaaccatgctttaagatttgaccgtgggccagccgcggtggctcacacctgtcatccctgcactttgggaggctgaggcgggtggatcacctgaggtcaggagttcaagaccagcctggccaacatggtgaaaccccatctctactaaaaatgcaaaaatcagccgggcatggtggtggatgcctgtaattccagctacttgggaagacccacttgatcccgggaggcagaggttgcagtgagccaagattctgccactgcactccagcctgggtgacagagcaagattctgtctcaaaaaaaaaaaaaggagaaagaaaaaaagatttcaccatgaaaacaggtgagcagctccccagtgcgcacagcgcttactggggagtgaccctatgagccagcgagtgcactcagaagtttatatccaagagaaacgaaaacaggattcacacagacgattgcacacccgtgctcaagcagcaccgttcacaacagacaaaaggtagaaacagcccaaatgtccatggatagatgtgtggatcagcacagcgtggtccctccacactggaatattactcagccatgaaaaggagcgaggccctgacccaggccccagcacacatgcaccttgaggacgtcacgctcagtgagagacgccagacaccaaagttcacgcagtgtgtgatcccatttctacgaaatgtccaggacaggcccatccacagagacaggaaggggatgcgtggttgtcaggggataggagaggggttggggagtgacagctgagggggaaggggcttctttcggaggtgatgaagatgggttggtgctcaatggtggtgacagttgcatgacagtgtgatggtggtgacagttgcatgacagtgtgatagtggtgacagttgcatgacagtgtgaaagtccttaatgccattaagttgcacactttaaagtggttagttttatgttaagtgaatttacccacaataaaaggaaatttaaccacaacaagacccgaagaaacccggttgtcacttacagctgctgaatctggggattgttcattaggttcgaagcctgaagaacagaacaaatttgtcaggaagacaaagctcccagcgcatcattctctttcatcagacactttccatcttaaccagccttggttctggactccagcacgccaaccaacagtaagagccgggcattcggtctttcatacccttttccctacattttcgcccccccacccacgagctgtgacctccacattgtgacttaaatcctgttttgggttcctgcttcaggagcgatctcgcagcgccacagcgctctctcactggctgctgcggttttgctgtgtggaggcgttttggttctttattttagctgctgtctgctttagcatatttcatttagcatatttggttccagttttgctctatcaataaatagcactgtggctgggcgcggtggttcacgcctggaatcccagcactttaggaggccgaggcaggcagatcgcttgaggtcaggagttcgagaccagcctaaccaacatggtgaaaccccgtctctactaaaaatatgaaattagccaggtgtggtggtgcatgcctgtagtcccagctacttgggaaactgaggcacaagaatcgcctgaacctgggagggggaggttgcagtgagccgagatcacaccgctgcactccagcctgggtgacagagtgagactctgtctcaaaaaagaagtaaaaataaataaataaataaatagcactatactgggcactttctcatgttaactttccacttgggattattcctttggacctgttgaaaggaggtggctcagaggtgtggcaaactctctgtgtaaagggccagtgtgtaaatactctcagccttttcagacacgggtgcctgacgcaactactcagctctgccgccgtatcatgaaagccaccagtgacactaggtgtatgaatgggcatggctgtgtgccaataaaactttattggtcaggtgtagtggctcacacctgtaatcccagcactttggggggccgaggcgggtggatcacaaggtcaggagttcgagaccagcctggcaaacatggtgaaaccccatttctattaaaaaataccaaaattagccaggcatggtggtgggcacctgtaatcccagctactcgggaggctgacgcaggagaatcgcttgaacctgggaggcggaggttgcagtgagctgagatcacaccactgcactccaacctgggcgacagagcgagactccatctcaaaaaaaaaaaaaaaaaaaaaaaccaaaaaaaactttattaacaaaacccagcggcgggccttattctgccaaccccagatgtctgaagggaaaaggcgtctgtgacatggccaagctgagaggccccttgaaagactggggcccagtcaccctccatcccatggtgagggagaacatattcccctggcagcttggccagcggacgagggctacagtaagaggtgtggcctctgctgaatggcacgacccgggcagggctcctggcccagctggctcatttttctgactgacagtgagactgagggcttttctccccgacagccttaggcgagtccctgtaccctgaggctgtgggagcctgaagagtggtcccagggcacacagacctcccaggaaatgaacatgtgtgtgtgggggatggctctccgaggatcccagtcaaggaactccctgccaaaggccgtccctttggaagcatgagtgcccgggcatcgggaggtccacctgcgcccggcgcacccggcgctctgcttcccttgcctgaaccttaggaggcagacgctgctgtgttgtgatcagtgtctctgcactgcgaggaggagcccacgccagggtggggtgggggtgtgacctccctgggctcagccaggagagccagcttttggtgctcactactgatgggtcttgcttgggacatcaacattggggacacttttgattgtcgaagcagagggtgggggtgctcctgacatggggcgggtgaggccaggggtgctgccagcgccctgcggtgcccaggacgaccccacagacaagacccatctggttccagaagccagcagtgccaaggcaaggaagccctggccagtagcggacacagcagatgcgggcctggggggtggcgcagacaccatggacagggaggaggggcgggccgttaccatgctcatgaagccagggttgttcagcaggccggcgatgtcgaagctgcccacgcctcccgtctgaggatgagaacagccctggttagtggggcctggaccagaggccacggtgaataaccccctggaactcagaaacaacggccccccacggggctcagacattctatcaaccctgcggccagagggtgctttgaggcaggcagcacgaagcacatcgcaaccgcccggggacggcacagtctgtcatcccgtgtttattccccgcacagcgcgaccgcccggggacggcacagtctatcatcccgtgtttattccccgcacagcgcgaccgcccggggacggcacagtctatcatcccgtgtttattccccgcacagcgcgaccgcccggggacggcacagtctatcatcccgtgtttattccccgtacagcgcgaccgcccggggacggcacagtctatcatcccgtgttgatttcctgtattctgccgctttgacaccttggggccttgctggcctggcagagccgccccctcctggagtagccaattcccagagaaagcaaatgactcacccagaaacgcacctttgaaatacaaacaaactaacccagaacccacaccctcagcacctcccccatcaccccagggccacagtccacctgccccactcacccccaggccagggaccaggcaaccaggggcagcccccaggcctgggtctaatgaaatggctccaaccagccaacccgaagcctcctcacccggcctcgccacaaaacccacatcgagggtcctttctgtgcccctccctcagcctccgcgggcagccctgcggccggcctcctgcttccaggggtctgggggcatgaaccttctcacgacactcacttccacgcctgtgcatctcaccaccaactgaaacaaaccccggaccctcacgacacccaggttaagcctagagccactggtgcgcccgaggacctgtcccccacccacacagtcagctcggcgttctggagccactcgcccccgctgcactcacggggctgggggcctcccgcagcttcagctccgctatcttgaggttggacttgtatgtctcgttgtcggggtccagctccagagccttcttgtagtaagccacggcctccacgtgcttgttgaggctggagagcgccaggctggaggagagcaccggggatggactgttcccatctgcccagctccaggaggccccgccaaagccctcgtccccggcggtcctggcaacccccaaaccacctcggatggtgccaccccctgcccgctgtcagctcagtggagacaaacctggctttcgaggggcccaggggcaggactgagggagacagacatgagaacacccctgccacacaagaactggagtccccatggggccacacacagggcctcaaagcccagagcgggctgagaggagggagcgggccagctcagggtcacaggaaatgcgtggatgttgtcttggccccgcttcccggcacagggcaccaaggaccctcggaacctctgagcgacagacatgtctcccgtcatccacaagcagcccctgacccccacctgagtgagtcttcactcgtgaggtgactcagggcccctacagagcccaggaggaggcgggtcctggggagactgggcagttgaacagggcccctccccagcctctggggagacccaatcccacaaactctgagcaagggcattcagagaagcaggcgaatgcacgcttatgctgggagggcggcaccggctgcacggggcgcaggctcctgccccggggaccctcctggcctcactctcggacctgtcctgtgtccttcatcataaaccaggtgcttccctgagctctgtgagccgccccagcaaacaatggagcctgagtaggagccatgggaaccccaggtgacagccagtcagggagaagcaaggggcccagggatctccgggtggcacctgatgcggggcgtctgtggggctgagcctgtgacctgtagggactacgttggctccgaacagctagtgtcagagttgaactgaaccggggtgggagaattcgttgtgggtgggaaaaaagccacacaagagaggaagcaggagcaggagaggaggggtcccgagagactggaaaggcgcggccgtggacaggcactcaccccatcctgccgtaggccttgctgtaggccgggtcaatgcagatggcccgctcacagtcctgcaccgcgcctgcgtagttgccgagtttgctgtaggctgcggctctggggaagaaaaggcagggcaggtccctcactggcggctctgagcccagcgggcagcccttgaggggagcctgagagctgcgttcctctccaacttcctggaggaacggcctcagttttccccatctgtaaaatggggctgatggggaaagctgagaggtgtggccactgagatgctcttagacaaatgtgggctcaaagcaccagcagccactcaggactgcgactctgaattttatttgcaaaaaatgttccgatccatggctgtacaagagcaatgagggtagggaacttatacccaagtttcattcacaaattatttacatatcagtaaaaaaagaactcagaccaatgtcaaagctcaaagctcttggcttacagcgtctgaatcgtcttcaccattttcgtgtttagtgtttctctttacaattttttcaaagtacagagaagagtgagtggagactaaactaccccatgacaggcggccaggaaccctgcactgcctctgcaactgtcctgtaagcctgaagcagatccaagaccacacattcaaaaaacacaaccctccacatactggattattttcttggcttgacatccacgtggaatgccatgatacctgattttctatgtatgtatttatgtatttattatttttgaaacagggttttgctctgctgcccaggctggagtgcagtgacacgatctcagctcactgcaacctctgcctcccgggttcaagtgattttcctgcctcagcctcccaggtagctgggactacaggcacccaccaccacatccagctaatttttgtggtttttttcggggtttttttgagacagagtctccctgtcacccaagatggagggcagtggcgcaatcttggctcactgcaacctctgcctcccaggttcaaaccatcctcatacctcagcctcttgagtaactggtggtgcccaccactacacccggctaattttgtatttttagtaaagacggggtttcaccatgttagccaggctggtcttgaactctcaacctcaagtgatcccccccgcctcagcctcccaaagtgctggaattacagacgtgagccaccgcgcctggcccccagactaatttttacattttctgtagagacgggggtcttgatatgttgcccaggctagtcccgaactcctagcctcaagtgatctttcccccatggcctcccagagtgctgggcgtgctacctgattttaaatcagcatcgactctccccgaccccgttgctggtcacctgatgctcgctcctggtctgagaccaccggtgaatggatccctcatctacagcgcagaggcctctcccatctcaggtccctgctaagcatcccggaggacgcccccgcacccggccgcccctgccctgggcaggccctgagctggtacctgttgcagaaatagacggcgttggctgggttgagctcgatggcttttccgtagaaatgcacggcagcttcaaagttttccactttcatctgctcgtttcctacagggagagaggaaaacaccggcccggtgtccacacagaccggagggggtgtcagggagagaggaaaacaccggcctggtgtccacacagacccgagggggcgtcacacttggctcttctgggcagccaggactcaacacagatgccggctcaggaggcatctgcatctatagggggttcgctagtcgcaaacaatcatatctacatccactaagggggatggaggtgggggcggcagggcctggcctggcctgtgcctggcgacggtggctgtcactgcctggatggcgaccccgggagcagaacagttaatacagctcaccggcccggggacggaaactgtccctttcgctattgcttttggaaagagcccaagtggaggcctgtattttggaatactcatgtgataccttctcatttcataggcaatggggcttctatctgaggcatgggtcccagctggtaggacggtaaaaaccccagctgctatcctagaactgagagccctgaagacagaaacccactcccgcccccgagatcccaattcaggagggcgtggggggaagatgggtatcagcgtgtgtttccctaaacagttttattgagatataatttacatgccacaaagcttacgctttaaaaatataagcccgggcgcggtggctcatgcttataatcccagcactttgggaggccgacgcaggcggatcgcaagatcaggagaccaagaccatcctggccaacacagtgaaacctgtctctactagaaatacaaaaattagccgggcgtggtggtaggcttctgtagtcccagctactcagaaggctgaggcaggagaattgcttgaaccagggagtcagaggttgcagtgagccgagatcacgccactgcactccagcctgggcgacagagcgagactccatctcaaaaaagaaaaaaaagaaatgggatcacatgctgtgcgtccttttgtgtctggcctctctccctgagtgtgatgtcttcacggtgcatctgcgctggggcctgggtcagagcctcacccatccacattccaccgtgtagatgggccatgctgtgctgaccatttagcgtggacaggcatttaagctgtttttgcttctttttattgttttattttttattttttatttttttttgagacggagtttcactcttatcgcccaggctggagtgcagtggcgcgatctggactcactgcaacctccgcctcccaggttcaagcaactctcctgcctcagcctcctgagtagttgggattacaggtgcccaccactgcacctggctaatttttttgcatttttagtagagacggggtttcaccatgttggcccaggctaggcttgaactcctgacctcaggcaatctgcccgcctcggcctcccaaagagctgggactgcaggtgtgagccaccgcgcccggcctcttcttgctttttgactcttgtgaatacagctgctgtgaacatgtgtctgggttttggtggacatgtgtctctcttgggcacatatctagtatcagggtggaaccggcgggtctcatggaagctgtgcaacttttgggggccaccagccagtcttccacaggggccgctcccgacaaccccaccagccgtgctgtgcctgaaggtcaagtttctctgcacctcgccagtcccctcgccagtcccccttccgtccccgtccccacaagccagcgtgctggtcatcagggcaattccctcagctccctgggccccagggaccagctggcctctgcgagggtcccacagccccggagtccaggtagggcgaggtgtctgtggggatggaggtcctcccttaccttcggttttgaggcgctctgcctctgctgagtcctcctcggaaggcggggttcgcgcggggctcctcaggtcctgcggcatctcctggacccggaggcaaaggcggcccgctgtcctctcctcccaacctggcaccctccggccttagcttccctcgggacgccagagagggccaccaagttccgaaggacccgggggctctgcaggggactcctggccccccatcatgtggccctgggcgagtgaccacagcgctatgtgtctcaggacccgccgatagggggaggagggccaagtgctcctgcagccacgtccccagcccaggagaggatgcaggcagagtgctgggggacgatgagagcggggctcctggggtccccagggctgcctgctgttgctgttcttattttgggggcagtggctggggaagcatcgaggctcaccttgcccgtggcagccgcttcaaatatctccggcagagtctgagggagcgcaaggtcactgtcttctaccgtcaccccaaacgcagtctccaggcactggatggcgactgaagcggggacagaggcggtcccattcattgcacgcagccccgaggttacgtttttgggtctagagggcggggttggtgctcatgcttccccaggtgtgttcattcccaaggaccccagaacgcaggggccgccgcctgtgctctgggctgggacagtggaccctcttccttcccgaaaagaaaagccagacagagacgccccgtgcccctgagagcagcagaggccgtgggcagagtggagcccaggtggtgacctcaggcctctgtggggtcccaatgctggggctgcccggctgcggcgtggtgggggcttggccccacctggagggccacgtcaggggtgaggtgccccggatgctgttgcacctccaagggcgcctggcctgagtaaggagcttgaagccagcccccagtagaaggcctgtatgactgggtctgtaccagggcaggaccattgagagcaggacaagaaacagccacagggcccctctctctgctggcccacctgacagactcagcacccagggggccctcccaccgagccagacaacactagccctggccgcctcctcgtgtggacccagggtcctaacccaggtcagaagtgggggtcagccacttcctgcccagcactgtgtcaaggaccccgggcacatccctacagctgtcactgggtgtccatgctacagaggcctggcaggcccaggacacaggtgagcgaggcataggtggggaaggaggacctagagcagaacctgcagccacacgagggtgcctccccgagccctcctttccctccgagccccggatccaggtgtcgcagaagcgcaagcaagaccagccaggagaccaaggcacctggggagcggacaggccatgcaggatgccaacgagtctgggactctggggcggggccagcactaggagagctttttccccgtgaccgatggtgacacacacacactgggtggtgagaacattccagaacacaccttggtggaagatggggagatggaaaaaagccactggaaggcagctcagcctgaaggcatcaagcagtggtggcgccacgcagtggcaggcgggagggctcagctcggccctggctcccacggccgggggctgtgtggccctgggcagacccctgccctctctgggcttagcttccacccccaaaaagccaggcgggggaccaggcatctacacaccaggtgtctacacgaggcgactgtgctggccgctgcccggggagagggggaagtggcaggcacccacctaccttccaagctctcctgagcatcggacgagaggcccccgtgccggagctggtcatgcaggaactggatgatggcgtaggccaggcgcttcttgttgtccatcttgagcccagaagaggtgatacctgggggtgcaggaaaaacccccatcaggccccctcacactccccactccaggcaccccaggcctgcccctaactagctgggcctcactttaagggtgctggctgatctcagctccaggacagcccaggtagaaaggccttaatacgcccatttcacagatgatgacctgaggcccagagctcaccaatccggctatgcacacagccagaaagtgtgaggccagcaggcaagcagggcctgccctagagaacccgcgtgctcccagggcctcctgagcactcccagggtggtactgaggcgccacggaggtcccctccgcccctgcttctggcatgaggtgggtgggggccagggatgctgcccagcaccctgcagtgcccaggacagctccactccagagaacgatccagccccaatgtccacagtgctgagagggagagaccttgtcctcagccagagccactgcccctttcctcaatttacctcttttgtggcatgtcagcaagcatttcttaggtacccaacggggccaggtgtgcctgccctggtatcactgtttcacaggacttgcagaggactccccccagggacttcttggggacccgtcttgttccccctgggaggcctacctacctcattccacctcagacccccctctagttccccctcggacaccctcctgtgcccccctcggacacccgcctggttcccccacctgacaccctcctggttcccccagcggacaccctcctggttcccccagcggacaccagcctggttcccccaccggacaccctcctggttcccccagcggacaccagcctggttcccccaccggacacccgcctggttcccccctcggacacccgcctagttcccccctcggacacccgcctggttcccccctcggacacccgcctgtgcccccctcggacacccgcctgtgcccccctcggacacccgcctggttcccccccggataccctcctggatgccccctcggacaccctcctggttccctctcagaaaccctcctggttccccctcggacatccgcctggtcccccctcggataccctgtcttgttcctcattcccaggacttgacagctgcttctgctcatgtctgtggtccctgcagtttcctgccaaagctctaaagggtgccagatggtgacatcaggagaggctgttctggaatctggagctgtagtctatggacaggtctttttttagtacaagacctttcacacaggtttcctgggtgcctgggccaacttggaggggcctcggccacagtgaccttcacggctctgagcaggaagccccgacgtgagcttcccccggggcaggctggccggctgccttgaggcgccagctcaggaaggcttggcctcactgtgcctccatttcccccgaaggctggcgatggtgactctaaacattcagatgtaacaagctgcgtggagaagcagccgcccccgcccccgccgctggagcagccaagttctgggctagtcacgtccacctgggacctgagcacgggaccttgtctgtgtctttgcagatggaaacaagtggagatgaggtcgctgtggtggccctaatgcagggattgaacatggccgcacggagacggccgcgtgaagacggaggcagaggctgaggccatgtggccacacgaagagaggtgaggctcgctggcccccagcagctggaagaggcaggacggagcctcccttggggccttcagagggaacgtggcccagcctgcaccttcatctcagacttctggcctccagaactgcgagggaaatcaatcttggttgttttaagccagccgggttgtgagggagaggccaggcggttcccggatcgtggcctgcaaagcctgtgagctcggacgggttgttcggcctgagcctccgcctccatgtctgtaaaatggggagctccattgtggctgctgtcaggggtcggggaaaaaataacccggaagctgtcagcccagcgcttggcgccctgcgatatctgttgttaatatcacgattctgccaggcgtggtggctcacgcctgtaatcccagcactttgggaggccgaggcaggcagatcacgaggtcaggagacagagaccatcctggccaaacacggtgaaaccccatctctactaaaaatacaaaaattagctggcatggtggcacgtgcctgtaatcccagctactcgggaggctgaggcaggagaatcacttgaaccagggagttggaggttgcagtgagctgagatcacaccactgcactccagcctggcaacagagtgagactccatgtcaaaaaaaaaaaatcatgattcctcgtggtgagtctcgtggcatagacctcggttggctgtttttggcagtgtgacctaggggaagcgacttaactctgctgagcctcagtttcctcttctgtcccccatggatggcgacagcacctccccatcggggggggggggaggggtacgagaccaggcgtgcacaacgctgagtgaacacccccacacaggcaggtacgtggacgggtgctggtgcaccctccgtgtccagatcaacacatgctgaggctattccagaaacgctgcccggctgtgcagtttcactgggagcatttggagaacctgctctgaggccagaagcaggcatggagaggggttgctgtggtgctggcgcatggaggggcagcccttggggaggccctggccgtgggatgggacccccatcctctgttcttgcgatgaggttcccttggctgggcctcccttctccacctgctccttccgggctgggctgggcagccgccttccctggaatccactccctgtccagggcctctggtgtctctgagcagctgggtcttccccatctctgtccctcactggctgacatacagggtggcggggctgtgtgtcaccggccttcctccggggccgggcccagcccgtgcatagtggaccttattcttagttgcactctgtgtgccaagacgcatgaggcaaggggcaggcctgaggcctcaggagctggggaaccaccgtgaggagaagcacaggtttgagatcagacgctcggattcaggctgggtcagacagggcctggccaagaggccgccagcctcgggatggacgaggaagggcgaggcctgaaggaatcttctacagtgacagctgcctctggataatttcttattcttctctgctctgtgcccagatctgctctccaagaagtgactaaagccacaaacacctacaaggaaactctgacccagcacccaggaggccacggctcctccttctgagccagcacagtgcaaggggtctctgccgccaggtcccactccccagctgggccccagggaccctctgcgcgcagccacgctgacaggcggctccaggggctgaatactgtcgtgtgctgaactgtgtcccccaaatccatacactgaagtcctaactgccaggaccttggaatgcgacctcacctggaaataagatcttggcggacagaatttggtaagatgacatcataccagtgtacggcgggtccctagagcaataaccaatgtccttataaaaaggggacatttggatgcagacgcatgcacagggagaacactgtgtggatgtgaaggcagaaatgggtgacgcggccacacggcagggacaccgagggcagagatgggtgacgcggccacagggcagggacaccgagggcagaggtgggtgacgcggccacagggcagggacaccgagggcagaaatgggtgacgcggccacagggcagggacaccgagggcagaggtgggtgacgcggccacacggcagggacaccgagggcagaggtgggtgacgcagccacacggcagggactccgagggcagaggtgggtgacgcggccacacggcagggacaccgagggcagagatgggtgacgcggccacacggcagggacaccgagggcagaggtgggtgacgcggccacacggcagggacaccgagggcagaggtgggtgacgcggccacacggcagggactccgagggcagaggtgggtgacgcggccacacggcagggacaccgagggcagagatgggtgacgcggccacacggcagggacaccgagggcagagatgggtgacgcggccacagggcagggacaccgagggcagagatgggtgacgcggccacacggcggggacaccgagggcagaggtgggtgacgcggccacacggcagggacaccgagggcagaggtgggtgacgcggccacacggcagggactccgagggcagaggtgggtgacgcggccacacggcagggacaccgagggcagagatgggtgacgcggccacacggcagggacaccgagggcagaggtgggtgacgcggccacagggcagggacaccgagggcagaggtgggtgacgcggccacacggcagggacaccgagggcagaggtgggtgacacggccacacggcagggactccgagggcagagatgggtgacgcggccacagggcagggacaccgagggcagagatgggtgacgcggccacacggcagggacaccgagggcagagatgggtgacgcggccacacggcggggacaccgagggcagaggtgggtgacgcggccacacggcggggacaccgagggcagaggtgggtgacgcggccacacggcagggacaccgagggcagaggtgggtgacgcggccacacggcagggacaccgagggcagaggtgggtgacacggccacacggcagggactccgagggcagagatgggtgacgcggccacacggcagggactccgagggcagagatgggtgacgcggccacagggcagggacaccgagggcagagatgggtgacgcggccacacggcagggacaccagattgccctcacgtcctcacaaggaacgagccccgacagaaccttgatcatggacttccggcctccaggactgagagacgatgaactctgtttcagctgcctggtctatggcactctgtcaccgcggccccagcaaaccgacactaacacctggcaagcaggcatctcaggacgcacctcagtcctcgtgacgactccaacaagcgggtcggccctgtctccagctgaactgagccaggttgggcagggacgcgtggtcgcatgcccaggatcacatagacaggagaacaaacgggctgtcatcacacggaagggagcagtgaagggcggtggccgagggacacggagggagggagcagctgcgcgttgctcactgtgctgcggtcccaggagccagctgcccgaggggcagcttcttttataagaaaacgacacttcctatcacgtctatgcaaatgtccattttaactttaagtgcacagatgtctaatggcccgagacacgtaggttaacacccgtgcacgcgtacacagaggccttcacctacaaccatccccgtgtagacagcatcagaggcagggcaccaaaagcattaaaaccatgcagatgacctacctgagcacttcgcagacctagaacgtcaactatgtaaaatacctgcccatgaacattggcaaactcctggcctcaagcaatcctcccaccctggcctcccaaagcgctgggatcacaggtgtgagccaccatacccggcctcctccaggaggcaaatgctgaggaaagccgtggattctactgacccactggattttgctgaagctgtgtgcgcgcgcatgtgtgtgtgtgcgtgcatgtctctccagattctgtctctctcccagaccagcggttctcgatggatgtgctgagacacttggtgttgtctcacatggagtggggggaggccagggacgctgctcagtgccctggagtgcccaggacggctccatcccagaggatgatccggcctcaacatccacagctcccactgggagaaagctggactagaagaggaggacctgaagagcctgtgggtgcaccaggcccttgacacaacaccgtctcatgacctcggcgcagtgacctatgcggcaggactggggatggaggtgttcactcaaggccactggagccacaggcacggcaggatccgcgcccggcaggcgcctgacctgcccccacactcaagatcagaggcgttcagtgtcttggttcccctaaaatgcctctacatgaggtgaacagccaccaccccctagaaaatgaggcgtgggctgcctgaccgcataacccaccccgcgccagagacaagcaaggcattggcccgccacgctttaaacagtggctgacgtcagactcagatgacaccggcgacgtggacctccacgccactaaacaagcatagtcccagacacactgggtgtgcccacagctttgtttccctttcagggaaagcaacatccatcagcaatcattaaaaaacaaaacaaaacagagagcaaaagagccagacccaaagcacacacagggtgtgacaccgactccatttctatgaaatgtccaggacaggcccatccagagacaggaaggagacgcgtgggtgccggggcttggggaggggaaggggagtgacagctggtggggaccagcttccttgctcccttttggggcgatgagacagctctggaaccagagagtggtgatggttgcacaaccctgtgaaggcaccaaatgccactgaatttcacggtgtggggatcacagcggtgtgggaatcacagctcaatgttttaaagggggagaaatctacaagagctgtgttttgtgtcgctggacagggagttacggtcttcctgaaagctcctgcgggatggtaatgagttttccgcccccatctcaggacacaatggacagcccagaactttgaggtctgggatcaggactgcctagagccggcgggcagccagtcccagaatccaaagatctcatgtacgacacatcagggcccacggcagtcaaccaccaccagaaagtgaaaccacaaaagctgacgtcatccgccccggccaacagggttcagagagcaaaccagtcaggtctcctgacccccaagcccaaggaaaacagacacatgccacccgaaaggtgaagatttttggtttacggagtttcttttgttttatttttaagcacgttttgacaacagcattacaatagccaaaagcaaacagcccaagtgtccacggacaggtgagtggatcaacacaatgtggcctagccacacgacggaacgctacgcagccatgaaaaggaaatcctgaccaggctacaacatgggcggaccttgaggacgtcgcactcagtgaaataagccagaaacaaaggtacaaaacctgtgtgactcccctcctaggcggtccctagagtcgttggattcacagagaccaaaagtggaattgggggtgccaggggctggggagtgaatgtttcatggggacagaatttcagcctggggagatgagaaacttctggagatgatggtggcgatggctacatagctgtgtgaatgtgcttaaagccactgaactgtgcatttataactgattaagatggtaatttttggcctggcatggtggctcacgcctgtaatcccagaacttttggaggcagaggcaggtggatcacctgaggtcaggagtttgagaccaacatggtgaaaccccatctctactaaaaatgcaaacaaaattagccaatcatggtggcgcacacctgtagtcccagctactcaggaggctgaggcgggagaatcgcttgaacccgggaggtggaggctgcagtgagctgcgatagagccactgcactccagcctgggtggcagagcaaaactccgtctcaaaaaaaaaagaaagactggtcgggcacagtggctcatgcctgtaatcccaacactttgggaagccgaggcaggcggatcacctgacatcaggagttcgagaccagcctgaccaacaggtgaaacccagtgtacaaaaaatagccggtcgtagtggtgcgcgcctgtaatcccagctacttgggaggctgaggcaggagaatcacttgaactcgggaggtggaggttgccgtgagccaagatcgcactactgtactccagcctgggcaataagagcaaaactccatctcagaaaaaaaaaaaaagaccaggcgcagtggctcacacctgtgatcccagcagcacttcgggaggccaaagcggggggatcacttgagcataggaattcaagagcagcctgggcaacatagggagaccccatctctgcaaaacattaaaaaattagctgggtgtggtggcacacatctatagccctagctgcttgaggggctgaggcaggaggatcgcttgagcccaggaggtccgtgctgcagtgagctgtgatcacaccaatgcactccagcctgggaaagagagtgagaccctgcctcaagaaaagagtttctcttcaaagtctggggtctttgagatgagggtcacacccaaccaggtgtctttagctgagaatggtgccgacatctcttcagaggtttcattggaaatgattctgtaacaggcggcatcaggtcaggatccccaggcagacacacctcacttggtgacctcagatttggaagaggcaacagcaagcagcagaaacaagacctgggccaggagcggtggctcaggcctataatcccagcactttgggaggctgaagtggtctggagttcctgaccagcctggcttctactaaaaatacaaaaattagccgggtgtggtggcgggtgcctgtaatcccagctactcgggaggctgaggcaggagagttgcttgaacctgggaggtggagactgcactgagctgagatcgcaccactgcacgccagtctgggtgacaaagcaagacgtcatctcaaaaaaaaaaaaaaaaaaagaaatcagacctggctgagtccccgcataaacctagaaggcgggggtcacagccccctcttacagagggagtgacaggcccagacaggtggcacacgcaagatcctaccagtgacagctggaactcggcttagcattccaggcacacagggcctagcacgatccacgctgaggggtgtggggggcaggggtgtgtgtgtggagggggatgtgcgttccttcgcagggaactaacacagaataaaccaagaaatctcatctttggttctttggtgtacctgtttccttctctcttaaactgaggtgtgagaactggacagggtggcaggtggctagggacccaatgagggttcagaaagtggaaagagttgcattcactgagtcacactcctctcttccagtgccgccggtgcctctgtaccccagggcttttgcacgtgctgctttccctcctggaacaccgccccccccggcccccgccgccacatcccagagaacctcttagcctcagggtctccaccctaccccatccctgttaccctgggacagagctgagcagaagtgccccagcttagacaccctgggctaggggatgccacggatccccaagagactctgtgtcccatgatcatttgctctactaaggtcccaggaggctgcacacattgaaattcacaaactatggaggattgcttgagcccaggagtttgaggccaacttgggcaacaaagtgaggccctgtctctaacaaaacaaaacaaaacaaaagataaaataaatccacacactaaggggagagggagcaaggaggtgaatcctaggagctggggaccccctgatttccaccctctgcccaatcagaagtttattctgctgtccagtgtgagcaggagcaagctcaatttttttcccaaataattaatgcaggtctgtcgcctgtggcactgtgggcatcttgggtggatgattctgtcctgcgcacggcagggggctgagcagcacccctggctccccccactgcacaccagaaacactctccagttgagacaaccacacatgtccccagacactgccaaaccgcccccagctgtaaatcactgatggccactaagtgggaagaaaggctggaagtcagtacaggtcagctttttctgtccaaaatgactttgctgtgagctttctgaaaaccttctgcttgtaggctattctgggtttcagaactgcgggtccacggtggaggactgctcaactaagggaagcacaggccctgcccagcatgtgacacaggccagtggtgccaggacctgtggcttctctgctgtccccaaggtgggggacatcatcaaacggttctcaaatctgcttcaacagccaggctttcccgtaagaaagttttctgctcttcagaggggggtccagcaagcatgaggacggcattttcctcaactgccgtttggcactcggtgtctttggaacaatcacaacttgtagggtttggctgtgggacagcatctcaaagaaggcctgctgtgtctcccaacagcgagggctttatggatgctcaggagccatggccgaggcctggtttcaaggcagaggccgcagaagtgagggtgggagggtgctggcccatgggggtggcgccagctccaatgttgggggcttcagcgtccctttcggctctgagccgatgactccacatcccaccttttcattttatcattaaaataaaaacaaaatcaaaacacagccacctcggtcggggcggtggctcacacctgtaatcccagcactttgggaggccgaggtgggagaatcgcttgagtccaggtgtttaagaccagcttgggcaatacagtgtatagtgagaccctacaaaagagactctaaaaaaaaaaaatagaattagcctgatgtggcggcacacactagtagtcccagctacttgggaggctgaggcgagaggattgtttaagcccaggagttggaggctgcagtgagctgtgattgggccctgcactccagcctgggtgacaaagtgagaccctgtctctaaaaacaaacaaaaaactcacaaccacctctcttccttatttccctgcccagaagggatcattcaatggaaaaaaatagaacatcctcgtaaactgaggtcgtcttacctcctcacaccccagtaggaagggcccgctcttacccactaccttctgtgaacactctgcccaactccatcccaaatccacggtgcttctcaccaacagcagggcaggagagccgggtgccctgctcctcactccctcttaggatacccgagttctagctcagtctcctgcccactccccacatcgaagcctacttccttctaaaatgccaccaggagatcgctgcacacataaaagctctcaactgctccttgcaaccccaggagtgtgcataggaggcctctcaccagctgggggtcatctgtggggcctacaccaaaccctgtacatgccactcaaactcaagtgctcacctcccctgcccaactccgccaggagagaatctagtattcctgcaaactcctatctctggcccagcatctcttacaaggctttctatctcttgacagacccatcttccctttgaacgccagcatctggcagcgtctaaaccctatggactcaggaaagcctgcgattgttgaaaaattcacagccacatggtcacgttccttggggaggccatttctctctgggtctctgtttccacctcagtaaaagagaaaacgggccaggtgcagtggggcacgcctgtaatcacagaactctggaggccaaggtggaggatcacttgaacccaggagtttgagaccagcctgggcaacacagtgaaaccccatctctaaaacaaaatacaaaaattagctgggtgtagtagtgcatacctgtagtcccagctactcaggaggctgaggtgggagggcctgagcctgggaggtcgaggctgcagtgagcagagattgtgccactgcactccagcctgggcgacagagcaagaccctatctcaaaccacccctttgttccttcagcctgtactgagcacttcctaccagagccactgttgggtcttggcataaaaaagaaaaaatgtagaattgagtaagacgacagctctcaaggatcctccaatctggggcagagctcacccgcatttggaatcattcacccttctaggaagatttaattataaacctcagctcaaatccttggcgtgcttacagctttccaggcacccagttaagtgctgtacatgcgatagcttattttaggggtcagcaaaggtttttctgaaaagggccagattgtcttcagctctgcaggcgttaagttccctatggcaactgttcaactgtgccttcttagctcgaaatcaactacaggtaacgcataaaccaaggagtgtggctgtgttcctacaaaccttcattcacaaaaacaggccagaggtggatttggccttctggtcagtttgctgataccttgcctggtttaatcctcacacacctgaggtggttactattataatccccattccacagaagaaaaactgaggcttggaaagatggggaccacccgagaccacccagctccgaggatgaaaatgaggagttctgaacccaggcagtctgacttgagaagctaaactccaaagtacccatttctctctgcacgaaattgggtgcacacacaaaactttgtacacgatttcccgggcccacacagtcccagctgcccatgctggtgaagaatcactgatctagggtagattttttttttttatttttgacagggtctcgctctgtcgcccaggctggagtgcagtggcatgatgttgggtcactgcaacctctgcctcctgggttcaagggattctcctgcctcagcctcctgagtagctgggattacaggtgcacaccaccatgcccagctaattttcatattttcagtagagacggggtttcaccacgttggctaggctggtcttgaactcctgacctcaggtcatcagcccgtatggtagggtttttaaagcattattgacatttaaagctggatcattttctggggtgaggccgtcctgggtactgcagggtgccgagcagcaaccctggcctccaccaactccaaaccagggggtcccccaaatcatgacaagcacaaatgtcaccaagaatccctggggcacagaattgttcctggttgagaaccactggtcaagggagggaaaaggcagacaaaaggaataatcagagacagaaacaaaagaaaatgggacaatcattcaacctctgaagggcacactacactgcaattttctggcacctaataacaaaaacagctattctcaagccagctctctcttatcaagttccaggcacctgatcaaataattgaatgtgggtttatcctcataatgaccctccgaggcatctgcttttacaactcgtttgcgaaagaaggaacagtttgctcagagagggaaggcgactcacccaggtttacacagcgggtgggaggtggtggtggacggtcctgaatcccagatttcccccacctctagcacgatatgcagaagaagactctaaacatgatataagacgaacgcctgctaattctttggagttctcagattccgctggaccctgcggctctccttctcctaggcagggacttttgaacaacgcccgttttacagaggggaaaactgaggctccgagaagccaagaggctgggcaaggtcacccaggtagggactggcggcgctggaaccagagttccgacttcagtccccacaaacgggggtccctgagtcacagggacgacgtttccaggcggttaataagagcggaacggcagcgaacacccagcgagcgctcactacatgcggggcgccttcccctcccgccgtcctcgccaccaggccgcggaccagcatttccaggacctggggcctggggaagggagatcagggctcgaagggcctgcccgatggcgcccggcctcagtttcccctccgcaccgcctactcacaggaccccgcgggtcgcggtgaccctggcctcacgatccccaaactcttacgagctttggggccccgtgggccccgagccgcagaccccagacccaccaggctcagcgcagtgcccctcactcacctctcaggcgaccgatccccgacccaccgacggttgcgcttgcgcaccgcggtgccgcccggccccggccccagggcgcgacgcctgcgcaaaagaaaggcgcccggagttgcttcccttctgcacaggcgcgttaatgatggaggcgggcgtggaaggaagtgacgcaacgtagaggcgggaaccagctggttgttagggcaactgacctctgcgacctaatggaggccggaaatcgggtctggtttgccctctagagcgggaatgaagcggtgcacggtggaacagtggctgactccagccggtcgccgagctgaccacgtggtgctgggccggccacgtggtgcagccgcgtttggacacctggactccagagcgtcacagctgcgcaatgaatgggagtcagtgttacccgcttactatctttgttcatttattcacccacccatctactcacccacaaatgcattctttcatgcagtgtgagacgtttgtgagtatagagccatttgtagacagcaggtgcctaatattcattcaatatttattgcaaagcagccataaaaaccagcaaagtgtctactctcattattttgcattggggtagacggactataaactaataaactagtacataaatagagaaacaaatttcacagcaaacactaagaaaaaaaaaatgaaggtagtgtgattgtcactgggagctaagtcgcatgggatgggtaggaaagatcatcctttacatttggatttcaaggataggaaagtccaaacggaccccaggcacagggaacagcgaaaatgaacgccgatgtaaaattaatcttggtgttgctcaagacatgtgatgagacatttccaaggacgacagaaaactgatcaccatctaagttacagttgccagaaatgttctcccaattcattttcgtcctactcaaaatacatgcacgattaatggcgtggattattttaatttcttttgcagaaataaaggaggtgaggccggccgtggtggctcacgcctgtaatcccagcactttgggaggccagggggcagatcacttgatgtcaggagttcgagaccagcctggccaacacggtgaaaccctgtatctactaaaaatgcaaaaattagccgggcgtggtgcgggcatttgtagtcccagctactcgggacgctgagacaggagaatcgcttgaacccgagaggcagaggttgcagcgagccgagatcgcgccattgcactccagcctgggcgactgagcgagactccctccagcccctccaaagcaaaagaaaacaaaacaaaaacaaaaaaagggaagaaaggaggtcggttgttttggtttttgccagtttaattgtagtacattgttttttctgggtgccctaacagttcaagacagatggttcaagatgttttttgttttaacccacaacactgcatgtaggtcaggctactgcactgttccacaacacctgttatttgacatgaatccgtttacttgcttttgtttctgacaaaaaaaaaaaaaaaaaaaaaaacttggcccggcgcggtggctcacacctgtaatcccagcactttgggaggccgaggcgggcggatcacgaggtcaagagatcaagaccatcctggccaacatggtgaaaccccctctttactaaaaatacaaaaattagccggggtgggggctggcgcctgtagtcccagctcctggaaaggctgaggcaggaaaattacttgaaccagggaggcggaggttgcagtgagccgagattgctgctactgcactccagcctgggcgacagagcgagactccgtctcaaaaacaaccaaagcaccaaaacttctggttaatttaattgattcgtcggattcagatgctggaaagtgggcctgggatatacagtaagcgatcaataataacactggcccaacacacagctataagaagcgaggcaagtacacattaacgcggtagcctgaagcccaagcgaagtctcagcgcaatgagccgcgcagaggctcagaggcgtcagcggcgtgcgcggtttccaaggaaaccgtccgtcctagccaccccagcggctctggaatggtagagcaagaggctccgcccacgcaccgccgagaccaataacggaccgggagggttacggcgagtgcgcagagggctccagcgcactcccggccctcctcctttagctgtgggcggggctcaggggcgcgtgcgtcctgccctccctgtgcgcgcgccgccccagcatgccccgggagcgcgggcggcgggccccttggtcctcaggcggccgtggcggcggtggcggcggttgggccgaggcaggcggcctcagtggccgaggtggctggacgcgtagcaggtggaaggagggagggagccgcaggcgcagacccacccgccatgaagccccccgcaggtaccgactaccccgctcgccggacccgggcgtcccctgcaccctcgctcctcccggggtcgcgacttgggcctaaggctggagcgaagcgacccccgagccaccctcggccgggctggaggggcagcgggggaggtggacgaccctgctctctcgtttgccgaatgaatgaaccagcttttccagcgcttcattcattctgcaaagttgatggcgcttcccttccggatgggtcgggccccgtggcggaccctggggaggccgtgatttaacgactccagtcccgttttcctggaattctagagccacagacagacattcaaaaattaaataagagaggatcgaagatagggagggatcggtgctctggtgcagataaacacgaacggggcagtcccagggacacgtttttagagagagggtggttcctggggggcttttctgaagaggtgagcgtcgacttgcttgattgggagaagcaagtgtcctgccaagaccggggaaggaggcgtcccgggaggagggaacgtgtttggagagcagaaagtcagtttggctggaacgtaacgaggggaccttttaattttgttatttatttactttgtctcccaagcgggagtgcagtggtgcgatcacgactccctgcagcctcgaactcttggactcagtcaatcctcccgcctcagccacctgagtaactgggactacaggcctgcaccaccacacttggctaattttttgtagaaacgaggtttcgccatgttgcccaggctggtcttgaagtcctgggttcaagcaatccacctgcctcggcctcccaaagtgctgggattacagacatgagccactgtacccagccaagacccttttaatttagaggcaaaggggcgatgtgacctgtgtactgtttatttatttatttgttggtttattttttgagacagtctgtgtctcccaggctggggtgtagtggtgcaatctctgctcacacaggctcaccgcaacctccgcctcccgggttcaagctatgctgcttcagcctcccaagcagctgggatttcaggcgcccaccaccacacctggctaatttttttttttttttggagatagagtcttggtccgtcacccaggctggagtgcagtggcgcgatctcggctcactgcaagctccgcctcccaggttcacgccattctcctgcctcagcctcctgagtagctgggactacaggcgcctgccaccacgcccagctaattttttttgtatttttagtagagacggtgctagccaggatgatctccatctcctgacctcgtgatccacccgcctcggcctcccaaagtgctgggattacaggcgtgagtcaccacgcccgtcacacctggctaatttttgtattattagtagagatggggtttcaccatcttggccagggtggtctcgaacttctgacctcaagtgatccgtctgcttcgacctccgaaagtgctgggattacaggcatgagccaccgtgcccggcctgggttttagaaggtcactcaggttgttgaagcaactccttgcctgatccttggcttttctcttgcccagccacactcccccagctctttgtccagcccattgcgatgagggtgataattgtaataatgatagtcagggatattcaggccttgggaaggaaggaatgttgtctgccttgtttgctactggatccttggcacaatcagtaaatatttacaggatgaactgacgtccacaagtttttcaaatcctaactcctgcaggagaattttctgacagttccagttcccatccatctccatcctttctgagcccctgaagctcttctttaccccacggtttaatgtagatccacagtcccttttttgcagttctaaaatcctaaatactctgtaaactgaaaggtttgccttaagtttacagcaaagtcatttggccagaaaatgacctcaactgaccgactgagagcctttctttttcccacttagcgaatatcattgattctcagctggggtgattgtgctacctctggggacactggacggtgtctggggacatttgtggttgtcacagttggggggcgctcctggtatggaatggatggaggccggggacgctgctcagcaccctgcagtgcccaggacagctccaccccagaaaacgatccggccccaatggccacagtgcagacagagagacaccctggtgcgtattcctgcatctcactgcagaaagagtaatttgatttcggagtgctgcctcagcctccctagtgatttggaatacatggcacttggactctattaatactgttctacaatggggggaaattctgaatgttaaaatgtccccggccccaagactttttggacaggagagcatggtctgtaataacagctacctcttgaaaactttctggtggtattcaggatacaagatgttttgccttcatacctcactgaattcttagacagttcttgttctctgcaccctgaattgttcccgttttgcaggtgggaagcctgagagttaatgtttcttgccagaatcccagaactagcaactggcagaggtggggtccgcacccaggccatctgacttcagcttctgcgttctgagctagcttgttgtgcctgccccagcctttgtaaaaatgcacatctgattgttagtgccactgtcccatccccttcctgtccctttccagggctccaccttgcactcaggattgaagttcaaagccttcattgtcatctacaccaggagttggcaaactccagcctgcctattttttttgagacggagtttcactcttgttgcccaggctggagtgcagtgctacgatctcagctcactgcaccctccacctcccaggtccaagcggttctcctgcctcagcctcctgagcagctaggattacaggtgcctgccaccacacccagctaatttttgtatttttagtagagacggggtttctccatgctggccacactggtcttgaactcctagcctcaggtgatccacccgccttggcctcccaaagtgttgggattacaggcacaagccacagcatccggccaagatggagtcttgctttgtcgcctaggctagagtgcagtggtgcaatctcagttcactgcaacctctggctcctgggttcaagcgattttcctgtctcggcctccagagtagctaggattacaagcccgcaccaccacacctggctaatttttgtatttttagtagagacggggtttcaccatgttgtccaggctggtctcgaactcctgacctcaagtgatccgcctgccttggcctcccaaagtgctgggattacaggcgtgagccaccgtacctggccaggcctgcctatttttgtacacccctggaactgaagatgatttttggatgagacagaaaccatatgtggcccacaaagctgaaaatccttggccctttgcagaactgtttgttggccccctgggtcctctgcagaactgtttgctggtcccctgggtcctctgcagaactgtttgctggccccctggaccctctgcagaactgtttgctggccccctgggccctgcacggttaggtgtttccaggtggttttgccaccttctctgtgccgagccgcactgacttcacatagtcgcccttcccgcagctgctctcgctgccaggagcccccgcctgccattcttgttttcaggctccatttacccgtttctcagagaggccctggtgtgagtggccgggccacatatgactcgcccgtagcacctgtgggtctggcacgaccacacgccaggctgactttcttgttgagttcatgaatggaggcctgcttgttccccccactgggtgtggggtgtggaagaagcagacagaagaagggactcctcccgaaaaccccccgatacctcacctttcccctctggcatggcaggagttgagcagtgcgtgggtggtcctggacttccccttttgtgaacacccaggggtttgtacaggctgatctgtgcatggtgtctccactctagggcagggggattttttttttttctctttgagatggagtctcgttctgtcgcccaggctggagtgcagtggcgcgatcttggctcactgcaacctccacctcccgggttcaagcaattctcctgcctcagcctcctgagtagctgggattacaggcatgcgtgccaccacgcccagctaatttttgtatttttggtacagatggggtttcaccatattgttcaggctggtctcaaactcctgacctcgtgatctgcctgtctcggcctcccaaagtgctgggattacaggcgtgagccaccaagcctggccgggcagggggatttttaacagcagtatcatctctattccgggctgatcgttctctgctggggccgtcctggtcactgcagggtactaagcaggatccctggcctccacccactccacgccaggagcatctgcaaccgcgacagccacatgtgtcctagatgtcacccagggttccctggatgggattgatggcagagtagcctcctgctctagaggactggtcagtctgtgcttccctacaagagccctggacctcactcttctggatgagaagcgggtgatcccttcctttccctctgccctcctgactttgaccctaactgaaccgaaagcagacccgcccggcactgggttttgtttctgcgtagcctgtgcaggagacatggcggacgcagcatctccgtgctctgtggtaaacgacctgcggtgggacctgagtgcccagcagatagaggagcgcaccagggagctcatcgagcagaccaagcgcgtgtatgaccaggttggcacccaggagtttgaggacgtgtcctacgagagcacgctcaaggcgctggccgatgtggaggtcacctacacaggtaagtcccaggcagggtctgtgcgtgggccgcaggtgccgagggaggtggcaccgcaggcgggagtagcccagcccgtggagccggttcagaacctggcttgaagtgtcaccagcaccctgcccctgagcacagggcagcgccacctgctcccaggctggtcgtggtggctaaatcagatggctgggcggaagcgtctggcaggtgctggtcactagaggtgtaggagagaggcagttcctcccgtgctccgctctgcttcacagcctcgtccattcaaaggactccctggttgtgtgatctgagagccggagatgagaaaatatgtctaaacagcacgcctctccagcctctcccagagccagcagccttgaaccctgaccccgtctggcctctttccctggcccgggaaggcgggtatttgtttctctctgaatgactgaacttggcccccttggcttctgcctctgcgccctccggcgggggtgacctcatgtcctcgggcgtcctcctcaccctcagcccgatcctcctcctctccttggggtccctgtgctcacggtgaggagtgaggtgcctagtgacaggggttagggacactgcttcccgagctctgcctaaggctgacagtgtacctgcctgaccaagagacccagagagtctccgcagagagctctgagtgaggcaactccccacccttccatctagcggaaggcctttttgctgggaaccatcgagaatccttgagttcaagcccagggcttctctcgtgttccaaggcatcccctgaaagggttggcctccgtggcccatgccatgaggcctccagagggtttgttgtctgggccaggggctggagggagggctgaagctccgcaagcaccccaagcctgcaggtcccgcagcccctgattggaatcctgaccctcttcccactccctctggcttccgacaagtggcttagagcccgtatgacctcggtttcccctcctcggccacgtggtggccccttgtccctcccgtaggagtctcatgaggctcaggtgataccagttccctcttatggcgcccagcggtgccaggcatcatttcccccgcccgtgccccaccttcccctcctgcggcctttcctctcctccttcacatggtggcgagactagcattaaaggaaactgaattcggccccagtgctcccctcggggcctttccgcttccctcagggtgacgcccagcatcctcggtgtggtcttcagcgccctgcaccgtctgtgcctggacacccagtctcctcgtgcctggcaccctcccccagccagggcctctccagccggcccctcgcgcccctcgccctgtgctctgctgaatgcctggcttctctctgatcacagattaagtccacttcgcccaggagcccttcctcctcctcctgtccccatgccagctgcctggattagtccctgcacggtactgacactgtcgtccctgcggtcacttgtctaatcggtcgcccgtaaatcccgagaggacagagctgattttctttctgtcttcagccctagcgtcaggcctggcccagagcccccactacaggcttttttgttgtttttttgagacagggtcttgctctgtcacccaggctgctgtagtgcagtagtgtgatcatggctcactgcagcctccatctcccaggctcaagccatctttaatttttggtagagatgaggtcttgctatattgcccaggctggtctagaactcctgagctcaagcttcctgcctgccttggcctccaaaagtgtggggattacaggcatgagccaccgtgcccagcccaccccccctctaaacacacggagcctcctccagacgtgcggagcctcctccaaacataccgaggcctggggacatttctgttgacccagaactgaggtagtggccagactgcaatttgaattcaggtctttctgctgcaaagtatatgcttttttttaaaaaaaattattattattagggtttttttttgtttgttttttgtttttttagaatgagtctcgctctgtcacccaggttggagtgcatggtgctgtcatggctcactgcagcctcaacctcccaggctcaagcgatcctcctgcctcagccttctaagtagctgagagcacaagtgtgtgccaccgtgcctggctaatttgtttttttaaactgctccattgagatatgatttgcataacatacagttcacccatttaaaccacacacttcaggctgggtggcggctcacacctgtcatcccagcactttgggaggccgaggtgggcggatgacttgaggtcaggagttcgagaccagcctgaccaacatccagaaaccctgtctctactaaaaatacaaaattatccgggcgtggtggcgcatgcctgtaatttcaactactcgggagactgaggcaggagaatcacttgaacccgggaggcggaggtggcggtgagccgagatcacaccattgcactccagcctgggcaacagcagcgaaactctgtctcaaacaaacaaacaaaaaaaaacccacacacttcagtggtttttaataaatttgcagcattgctcagctgttaccattctttcattttagagcattttcataaccccagagagaaattttatacccttaagtggtcacgctccatctcccctgtccccagccctggcacccacgcgtcccctcctgtctctgtggatgggcctgtcctggatatttcgtagaaatggcaccacatggccgggtgcagtggctcatgcctgtaatccctgcacattgggaggccgaggcagatggatcatgaggtcaggagttcaagaccagcctggccaacatagtgaaaccccatctctactaaaaatacaaaaattacctgggcgtggtggtgggtacctgtaatcccagctactcgggaggccgaggcaggagaatcgcttgaacccaggagttgaaggttgcagtgagccgagactgcaccactgcactccagcttgggcaacagagtgacacttcgtctcaaaaaaaaacaaatggcatcacacactgtgtgacttttgtgtctggcttctttctctgcatgtgacatcatcgggctgcatccacaccgcagcctgttccagagcctcattccttttcatggctgagtcgtgttccactgggcagaggccacatcttgtcagtccattcactcgtggatggaccttttgtcaattgtgaatcgcgctgctgtgagtgcacgtgtgcagattcctgtgtggatgtgtgttcatgtctcctggctggatcctggcactggagtcttgggggtcatgggatgactccattttaaagcttttttttttttctttttttttcttttttgagatggagcctcactctgtcgcccaggctggagtgcagtggtaccatttcaactcgctgcaacctccacctcccgggttcaagctattcccctacctcagcctcccaagtagttggaattacaggcacgcgccaccacgcctggctaatttttgtatttttagtagagatggggtttcaccttgttggccaggctggtctcggactcctgacctcaagtgatctgcctgcctcggcctcccaaagggctgggattacaggcttggccaccacacctggcctaaagcttatgcttttctagccactgacacttcctctactcaacctaaagcacagatgtgctcaggaaattgtaagtagtttatgcatttaaatgtgaccatcggcagctgcagctctctctggaatggaattccgtcagcctctgtttcgtcgtacccagctctgttgggtcctccttggcttggagggctttgagttgaatccttatttttcttcggtctgtaagatctccaaggacacaggcaacagcacctcctttctccatcccagggcccagcctggaggggacggtggcgtgtgcctctagtcccagctacttgggaggctgaggcaggagagagttcacggggggattcagcagacaggcctgggagaggggtccgggcaacacctgccagttgtactggggcctgttctcacacctgtctccctggtctcccctgttttagttcagaggaatatccttgacttcccccagcatgtttccccctccaaggacatccggacagccagcacagaggccgacaagaagctctctgagttcgacgtggagatgagcatgagggaggacgtgtaccagaggatcgtgtggctccaggtgagggggccctgcggggagtgcaaatagcctcccaagtaactaggattacaggcgcccgccaccacacccggctaatttttgtatttttagtagagacggggtttcaacgtgttggtcaggctagtctcgaactcctgacctcaagtgatccgcccacctcggcctcccacagtgctgggatgacaggtgtgagccactgtgcccggcccattttttgtatttttagtaggcacagggttttgccatgttggtcaggctgttctcaaactcctgacctcaggtgatccgcccgccttggcctcccaaagtgctgggatcacaggcctgagccaccacgcccggccacacatgtgcactttcatttcctttcctggccatcctagtgtgacccaaacaccccatccccacatggcgtgagctggcagggcctggcggcatggctgcgtgggctcctgctcccccggatgctcctcgcagtatgcagtggggcctttgctgttgatgtcacatgatcaggagagacccagagaccctcctgctgctgttcatcctcttaggcgaggacccctgggaatgtgctgatgtgtcccacagtctcaggatcatgcagccctagtgctttggtaaatccagatcagggtgacccatgatagccgtggattgttatttctttttatttaaatacagacagggtctcacaacgttgcccacgcttgtctcgaactcctgggcccacgcaatcctcccacctccactttccagagtttctgttgagacaatgagaggttcccatgcaggtgcaggaaagaatcgaatgcctttgccaactttgcccaggtccccagtgatgacgttttgcaaaactatggtgtcatctacaccccgataccgacctggagaccaccagcaatctaattcccattcagccatcgcactggtgaaggagctctggactgatgtcagtgtggggctcttccaaacaaagcgaacgtttgcacaggttttatgtagagacaggtcgtcatttctctgagataaatgcccaggagtgcagttgccaagtcacacgggggccggatgatcaggtttttaagaaactgccaaactgctctttggagcggctgcactggcccacgtcctacatgctttgatgtttttattccaggagaaagttcagaaggactcactgaggcccgaggctgcgcggtacctggagcggctaatcaagctgggccggagaaatgggcttcacctccccagagagactcaggaagtgagtgctgggtgtagggagtgctgggcgtgggcaatggtcgatcccggggagtgctgggcacagggagtgctcagtcccagggagtggtgggagcaagaagcgcagggcagggggagtgctgggctcggggagtgctcggctcagggagtgcttggggcatcaggagtgctgggttcagggagtgctgcgtcccggggagtgctggactcagggagtgcttgggcacagggagtgctgggtgccgggagtgctgggtgtgaggagtgctcggtcccagggagcactgggcatggggagtactgagctcagggagtgcttgggcttggggagtgctgggtggggggagtgctcggtcccagggagtactgggtgtggggagtgctcagtctggggagtactcggcatggggagtactgggcacggggagtgctcagtcctggggagtgctcagttgcggggagtgctgggctcagggagtactgggtgcggggagtgctgggcgtggccagtggagcttctgtggccccctgcccctgcctcctcgggagcgtccccccttcagggctgacccccggcctgatgtccatctttcttctgcctgaggacctgaactctggcaaggcaggtccacacagacatggggcgcagaggctcggtaacgaggggagcccctccacccactgcccggtgtgcctgatgtgggcgtctcaggggtgacatgagttagttggtgcagagctgggagcgcagcgctgaagtcaagcgtagtgtgttagcagaagcccagtgttcagcggcaccaacagagcagtggcgaccgccactggaaagatgcgtgtcacagttcccaggaactggcagctcgccacatgggaagcatggctgggtcaggaggtgtgctctgggcagggccttcgctggggtcccttgtgaaggcatgggtgtagcggggagtgggctcagggttggccggctggaccatctcagccagccctggcatgggggctgcccctcatcgggtgcctggccctagggtaatgggggccggtggatggtgccccagagtgtaggggctcgagactagttgatttgcacgtgaaagatgtttgcaggcgagctgttggctgtctctgggaggggccatttctcgagggccagcaaggcacccaaatgtcaaagcatcagaatacaggcccctgattcaccatggtgtgtgttcagtagaaaccgtgcttggaatgctgatctttccgaggccggccacttgggcacttgctgtcctgtgacgctgggcgccagccacagctaccagctagcctgcaatgacgcaggcaaactgaaaaccgaagttacatgagatacccaacacctcatatccgatagcctttgccttcggcgatctcaccagaatgtgggctgctgtgagttcctgagcacgcttaagacaggccaggttaagctgtgatgttcgctcctattaaatgcatttgtgatttatgatattcacaactcacgatgggattattgggacatacccctgtcctaagtcagggagcatctgtacaggaaagaaagcacacagttcaatcaggtcccaggctgcagccatagccccatggctgtccctgttccggttccataaagccaccgctgtcctggttagggggcgtctccaccttatggctgaggcaaccaagactcagagaggccaggtgggtttgtcagtgaaaccagcactgacgaaagcggagtcagggtccgtctcagtactcggggactgggggtcctcagctcagccgcagcggacaagagccagttatttttatttttatttatgcatttatttatttatttagacagggagtcacactctgtctcccaggctggagtgcaacggtgtgatctcagctcgctgcaacctctgcctcctatgttcaagcgattctcctgcctcagcctctggagtagctgggattacgggcacccgccaacacagctggctaatttttttttatttttgatagagacagggttttaccacattggccaggctggtctcaaactcctaacctcaagtgattcacccgccttggcctcccaaactgctgggattacgggtgtgagccactgtaccacagttatttttaaaaccccttcggcttgttgcatgcccagcatgtgtggccatgtgcatggtagaagccacaaactctcccacaagggccagcaagcaaggagggagcagaggcagccccgcctggaggacagaagcgcggaaaaggtgcgaggtccggatgctggcgagcagagttccagcgcgtccccgcggcccttagggccagcgctgtgtgctcattgagtctccagagccttccctggcatggctgggtttgttatgtgagatggcaagagggggagacattgggaattgcccagcatggggcctgttcccaggagaggcccagcaaaccctcagctggttctgaaccagggccttcctgacaagatacaggctccctgcaaagtcctgggcacagtttccccctgctgccgccctctgtcctgcggatgagcatttctgctctggccccatggagctgggctccagacccgcctggcggagcttccagcaggagaatctgagtcaaagtacagccctgctgccagcctgtcatgtgtcatgtggcctcaagccaggtccttgtcacatagtggtcacctcccagccttcaaggccaccagagggaccactcaagattcagttcctttgttgatatcccatatcaccagggtcgagttttagctgtttctaaaaccagctttaccagataaggggtaaaatgttcaaaagctgccagacacggtgactcatgcctgtaatcccagcactttgggaggctgaggtgggaggattgcttgagcccaggagttcgaaaccagcctgagcaacatggtgaaaccccgtctgtaccaaacatacaaaaattagctgggtgtagtggcgtgtacctgtagtcctagctactcaggaggctaaggcaggaggatcaattgagttgggaggttgaggctgcagtgagtcgagatcatgccactgcattccagcctgggcaacagagcgagtccctgtctcagaagaatgttgaaaagcttaggctgcaggctctgaaggtgattccttaatggataggagggtctggagcactcttggccagggccacacctgacagaccggagcacatccctgaggttgcccgaggtcacccagctttggatgccgcagctggtgttgaaatccacactgcgcagcctcgtggcctccgtgtctgtctgtcctccgcctcccgtctcactctttcctcctcggttgcctcttctttcggcctggttcttggggaaatccctcagccctcggcgagagggttcccaggcgttgcgtctccccgcggagcccgccccggtctctccctcccctcacgccccgcctttctctccagaacatcaaacgcatcaagaagaagctgagccttctgtgcatcgacttcaacaagaacctgaacgaggacacgaccttcctgcccttcacgctccaggagctaggtaggggccgagcagtggggcacgggtggccatcggtcctgggactcagtgcaggcctgccaggccctcgggggccgccgcttcctcctgtgggcttctgtgctgaagggcggcgggaggccgaagtacgtggacctgaccgccctgggctgaggactttcctcaccggaagcgctccagggccgtttacagccaaaagctctgagccctccttggggagggccatggtctgtcccaccaagattccaccctgatagaaaatgtccctggcagtggcggaagcccaggccggacggggtggccaagggtgccagtctcagccatggccctgagggaaccacaattttcccttgagaccccacttcctgcctgcctttatttatttaatttaattaattaattaatttattttgagatggagtcttgctctgttgcccaggctggagtgcagtggtgcgacctccactcactgcaacctccgtcccccgggttcaagtgattctcctgtctcagcctcctgagtagctgggactacagacgtatgccatcacacctggcaaatttttttatttttagtagagacggtttcgccgtgttggccagggtggtctcagactcctgggctcaggatctgcctgcctcaacctcccaaagttctgggattacaggcatgagccaccgtgcccaggcaggccggaatattctgatgggtgctatagaatataacctccagttctagactctgaatgtagttgcctctgaggtggtgggtggggacaaggccctcatggccggaggcctccgcaggtggcttgatgtgtggtcacctgggcgtatgtttcctgagggaacactcgcaggtcgggcactgccaagcttggctgccagccacttgctcagccctcccgtgtctcgggcagcacatcctaccctcagcttctggcactcaggagagacgacgggctacaatctgccgtaaagcacgtttcccagcctgcccctcagtgggtgcactgatcacccgcaccattcccgcagccacccacgccatcccgcggccacccgcaccgtccccgcggccacccgcaccatccccgtggggctgcttctcctgcctgctcgtgttagcaagcagaaggactcggtgcctgatgttctagaagccaatgccatggcaccaaggatttgaggaaacaaaagcttctcattgcaagtgactcccaaggagactgggcgtccagctcaaatctgcctcctgtgccagctttcaggcagtactttcatgagagaaggtgcagaggtggattctgggattagcaggtgattgttggaaggaaaggggaggtctggaaggtccttgggcacgcacagttatctgtccgtgccagctcgtgggtcctgggtgtgaatcctggggaagtctgtatgaagcgcggtggaagttcagttggcatcagccagctggttctgcacagactctgctggctcatgtgggttccagccggtttcagccagttttgttcttgtcggcgtttcagctgcctgtttcttttcacgtttgccatcctgcaaactcgaatgtttgtggattttggtgtctaactctttggggtgccgttccatttgtcgggcctgaggggtctcccgtgcaggtggcttgagtcccatgtggccaggtgacaccgtcatgcgggtggctagcgtgttgggtgacagtctccagggctgtccgctgctgctgccccgggacctgtttccctttgtggtccgtcatttctcaggagacgccttgcgatggtcttagttccttttcttctgcttacaacagaaaacctaaggccatgtagtttataagaaaaggaattaacttgtcacagctctggaggctgagaagtcccaggtcgaggggccatatctggccagggccttcttcctggtggggactctggagccctgaggcggccagggtgtcacatggcaaggggagggggctaagcgagccggttccacccaggtctctcctcctcacaaagccccaggccctctgccacattaacccatctgtcccttcatccatgaatccatgaatggattcatccattcctgaaggcagaggccacatgacccagctgcctcttgaaggccccagtacctaatcctgccatctcccaataccaccatctccaacaccgccatctcccgatacccacatctcccaatacccacatctcccgataccgctacctctcaataccgccacctcccaacactgccatctcccgatacccacatctcccaatactgctacctctcaataccaccacctccaacaccaccatctccaacactgccacctccaacaccaccatctccaacaccgccacctccaacaccgccgtctcccgatacctccacctccggacacccccacctcctgacccacccacctcccaacaccaacacctcccgacacacccacctcccgacacccccacctcccaataccaacacctcccgacacccccacttcccgacacccccacctcccgacaccaacacctcccaacaccaacacttccccacacccccacctcccaacactaacacctcctgacacccccacctcccgacacccccacctcccaacaccaacacctcccgacacccccacctcccgacaccaacacctcccgacaccaacacctcccgacaccaacacctcacgacacccacacctcccgacaccaacacctcccgacaccaacaccttccgacacccccacctcccgacaccgccacctcccgatacccgcatctcccgacaccaccatctctggcattaagttcctggtgcattttggaggggacgcacccaaccagagcagagacctgtgagtgtccatcactcgcacattgtcatacactagttgccatgtccatggatgacttctgccgccctcaccctctgggcatcagtcatcctgccgtgactccgaaccttccctccttgcctgtcttcttactgatttgtttctgtccgtgtgcatgaggcttctgtcttattcccgggttatcattcattatcatttatcccagtgctcaaatcgtcccacatggaccctcaggagtccctccgaacaatccctgtgtccttgtaatgcacctgctgtcctctgaacctgctcttactgtggggcacatggtaccgcaggctcggcctctgagcccgcgcttactgtggggcgcgcggtaccgcaggctcggcctctgagcccactcttactgttggacatgtgatgtcgcaggctcgtcccatgctctccctgccccagccctcagatgctccatttcttggaggagacctggcgcctttgagtggagggtgacttaggcaccggatgtgttcaccactgccagggagcagcattcctgggcaccgttaacagttaggaagcagacacgcatctctgcaccacacatggacacacacactcttctattctgtgtctgtatatcaaatccacaagtgcagcggggcatgccggcacacacctgaggtcccagccactcgggaggctgaggcagggggattgcttgagtctgggagttcagggccacagtgaacgtgaactatgcattcgtgaactatccattgcagcctgggcaacagagcaagaccctttttctaaaaaaataaaaacttccaggagtccactttgcagcttctcttccagtccagcgctgctgggccccccagctgtctcccttgctgtcctttaactcccgtctccgaccgccagccgtcactcctgggtgacacactgtcgagatggagagctgctgtttgaaggcccgtggtccttggaaaggacgatgtgcaggtcccgggaggcctccccctcatgctgcagtcactcggcagacaattgccaggcccacgctggtgctggggtacaaacgggaaggcgggggctctgccggccacaggactctcagctccctcatcaccacccacacccacgggctggcctcccaaaatttcccccatctgcctctggccccccaaccggatcattctttccacccttgcctccctggggtccccgtgagctcccgatcattctttccacccctactgccctggggtcggggtgagctcccaatcattctttccaccctgaccgccctggggtcggcgtgagctcccgatcgttctttctacccctactgctctggggtccgtgtgagctccggatcattctttccaccctgactcccctggggtcggagtgagctcccgatcattctttccactctgaccgccctggggttgaggtgaaccagtctttgcattgaagctgcaagcctgaggcacggtggccctggcgtctcccgagccatgaggtaggaaccccagagggtttcagtccgggatgctgccgcccccacttctcttgaggctgtcgggcaggggccaggtgggagggtgtggctgccgggcagcggggtgaactgtgtcctgccaggggttttgtgggtggagaagggacagcagggctccagtgagaagctctgggagtaggaattgggtctctctggagggacacacttgaaagtggttgagccgtggggctgcgtgctgagatctcagctctgagcgggaggctctgcctgggggtggttcttcaggaaaagcaaagcaggacctccctctccacgtggggcctccctctccgcccagggcccagcgtgctcagctctcctgctgtttttgtctttgatgggaggcactgcctctaacgctggtttccttgtgcagtggccgggccacccttcccgccaccctcctcccttcacacatgaggttggtgacggcgccctggaagcccacgatgtccgggggttgggctggatttagctttaacctctctggggcaggagatcctgctctgaggatgctggggggtttcctggtggggttagaggcgggacgtgagaaacgtggcaggtggtggccaggctgtgggggagccagggtatttcttgatggggttagatgggggatgtaagaattgcagcgggtggtggccaggctgcagctgctcgctgagggcccccttgtagctttccaggcagaggggaagcccaccccttccctcacacgctgtgtgcaggctgtgggcccatcagtcctgtcaaagccaccctggttctgtccccataggagggctccccgaggactttctgaactccctggagaagatggaggacggcaagttgaaggtcaccctcaagtacccccattacttccccctcctgaagaaatgccacgtgcctgagaccaggaggaaagtggaggaggccttcaactgccggtgcaaggaggtgagaaggcacggccagggggccccagaacagtgggtctggagcttgtggggcccgtctgctccatgtgtgtgaggcacctccaggctttgcacttggatggcctcccaatctccctggccaggcccagtggccagcagaggcctccctgtggggctctgccgtgccctggaggtgtctgtgctgggctccacccagaccctggggccacagctcagggcccagttcatccttcccaagctgagcctcctgctgctgctctgagcatctggccgcgcacacgtctcgtccctcccttatctggagccgcccctcaggtgtgtcagcccagatcattccttttgtcttaaatgatggtgcccggacctgagcctgggtccacaggtgggttgtgactgggctatctcgctgtgactggcgtcagacggccgttcccacagggacacatgtaactgtccacggcgccatggtgtggtcggtcaggtggtctctgcacgtctcccattcgccatctggaacaggcagaggctctaggagtgggcctcttggtcccctgacgacaccaagttggtgcttgtgcggctggcaaaagggggatacacgctgatcactgcaaagggatgggcgggcactgatcactgcaaggggacgggcgggtgcccatcactgcggggggacgggcgggtgcccatcactgcggggggacgggcgggtgcccatcactgcggggggacgggcgggtgcccatcactgcggggggacgggcgggtgcccatcactgcggggggatgggcgggtgcccatcactgcggggggtgggggacgggtgggtaccaatgggggtacaggtgggcaccgatcactgcaaggcaggggggtgctcctcgctgttcagggaccgggaactcagtctgctcagatggggcgtggcctgccctctacatgttggctatgaattcatgttgctgttaagcctaagtaggtggacccgtggactgggcacacctcgacttccccactgcgccttagaaggtcaactgggcaatcccgtcctggtccccaggcttgggtcctagtggcagagtgagggccaggccaagagggcgcacacgggtgggctgagttccaggtcccgggggatgtgccgcctcagagaccttgctgctggcggtcggcctggcccctatttggctggctgctctgcacgcacctgctggttacagctgggtttcctgtggacccagctggtgggcacatctgtcctgaacaggcctctgtttctcctcgtaaacgcctcacgtggctttcatgcgtcctcccccacccccactggcttggttggcagtgccagtcctcagaagtgaggctgtgtgcatgtcatttgctggtggcgataggcagagcccgtgagactgggaaccaaggcctggacatggaggtgtccccacatgcagcagtgatgccctcggaggctcctcggacagcccctggtccccataccacgttccgtgtgaggccttagagtcatctgcaccccttctggttccaaaaaggccttgggattatgataacgctggtggcatgaccagaggagttgtgtagtaacacaggccgagaggggcagggaccggaggtcagacggagctggatatgagcctttggccctgggacagggcgtgctggccctggaggtggagggagtggcgcccctgggtgacagtgtggtggtgtcggttgcaggagaactgcgctatcctcaaggagctggtgacgctgcgggcccagaagtcccgcctgctggggttccacacgcacgccgactatgtcctggagatgaacatggccaagaccagccagaccgtggccaccttcctaggtagcccttccttcctcctccactggggtccctgtggggaaggttctcagggtcaccccaggggacagtcggtgctacccctagagccttgtcctttccctccatgaagagggacttctgacgcctgccctggctccctcactccccccgagggacccttacagaacagggaagcgcccgggccctggggtcagtcccatgcttgcacccggccccgccgccccctcaccctgagcgtgaggatgctcggcccctcgaggggttgccgggaactgcgggtcctcccttccaaatggggagcctgacgaagtcgcggccgcgggcgggcgagcccagagccatggaggagcccgcgaggcgagaggcccacctttctgccctccccgcagatgagctggcgcagaagctgaagcccctgggggagcaggagcgtgcggtgattctggagctgaagcgtgcggagtgcgagcgccggggcctgcccttcgacggccgcatccgtgcctgggacatgcgctactacatgaaccaggtggaggagacgcgctactgcgtggaccagaacctgctcaaggagtacttccccgtgcaggtggtcacgcacgggctgctgggcatctaccaggagctcctggggctggccttccaccacgaggagggcgccagtgcctggcatgaggacgtgcggctctacaccgcgagggacgcggcctcgggggaggtggtcggcaagttctacctggacctgtacccgcggtgggtgagggcagcgggggcggggggcgcaccccggccctgggtctcctcggagcccggtgtgcccgtctgagatgggaaggaagtcgttgcctgctccatggggcctcggggatgaaccccgagacgtagcacccgtgggcacaccacaggggccgaaaatgcagctgtccccgtttccagtctcactcagccaccccgacagggcgcagctctgcccaggccggagtcctttaggggagggatggcagccggggcctggccgtggttttcatgctgccctgcgccaagccacctctgctgagagggaggtttagaacctcagaggtgcccggcggtctgggttagcagtcaggtgggctgagggatgcggagtcagggactcttgcggtgtctctagtccctgcggggcctgacgctgcctccctccccagggaaggaaagtacgggcacgcggcctgctttggcctgcagcccggctgcctgcggcaggatgggagccgccagatcgccatcgcggccatggtggccaacttcaccaagcccacagccgacgcgccctcgctgctgcagcatgacgaggtggagacctacttccatgagtttggccacgtgatgcaccagctctgctcccaggtgggtgcgggcccgggcaggggcaggggcaggggcaggggcaggggctgcctgtggtcagcgaggcccaagcctggggcttcggcttccggctctctctgcacccgtccggtggctccttcatccaatgccacccaaagatggtgactccctgtcatgcccgtgtcctggggctgccccagcaaaacaccacagaccagggcttacacaaggtgcgtgtatttcctcatggtcctagaggctggagtcggaggtcacagtgtcagcagggttggctccctcgaggtccctccttggcttgtggccgccaccacctccccgcatcctcatgtggtcgtccttctgtgtgggtccccatctcgtcttcttacagggaccccagtcatgccggatcagggcccgcccaacaacctcacttgaccgtagtgacctccttagacatcctgtctctaagtagtcacatcctggccaggcgtggtggtccacgcctgtaatcccagcactttgggaggccgaggtgggtagatcacctgaggtcaggagctcaagaccagcctggccaacatggtgccatcttgttgcaagcatctgtcctagcacacagtcagcaatcgctcctcagaaaggctctgtcctatgaagtcactgagaaccctgagaagtgcatgcagacctgtccctccaaggggaccctggtcacgtgttcgccaactgatcattccagaaccttactgtgtgtgttttgggttcaagacaccttactgctgtacagcgctgacgggttcacgttgaacacatggctggtggctctgtcacccacacctgagcacagcttgcacacacagggtgtccccatgaggcacatcatggcctcctggtgctgaaggagacgagacagtgctctgcacaacgcttggggccttttaaacacaaaatcaccaagagcagaaagatgcaaacaccgtgcccccactagactgagaaaaggacgcttgctcataaaatgagccgaagtgagaagacagagtgcggcccttctgaggaccgtctgctcaggggcgccgcagtgctggcctctggggtttttgtggatcttagtaggcgagtttgaaaacacggagtccaggaatgaggatcgaccgtgtgtccacctttcctggcttccctgccacactgtttgcacagcactcgtagccagcacacgcgtgtgcacatccacacaggtgctcacacaggtgcccacgcacgtgcctgcaggcctgctttgcatgctgctttctgcgtgtccctggcgcctggcacggcgagtcccttggtgcattccgtcgggacaaggagtgtggctgcgtggtccttggaacagaaaagcctcggtgttgcagagaggaccttgaggatcacccaggagttccctcgccgttggctgcctgccatggttccagcgggactcagtcaagggctgtgcttttagggaaggttccacacacacacgagcagggagatgcagcatgcctcacagcgtccccacccggacctggccgtccccaggtcccaacccctcggggtgcggagctttcagggagcagcagctctgtggctagaggagaagcgtgggtggcctccagggacggggtcatgtggccggcatcttcaggtgtgtcctgctgccaccggcagccagcagcagcccaggggcctccgggtcccggtcgttttccagttttggggtgggagggccgggcccagcgcatcacctgtgcactcgccctgtttgcactgtggcagctgacacgggccaggccggcgggaacgggctaggcaggacctgggcactctgaggctctgccccatccctgcaggcggagttcgccatgttcagcgggacccacgtggagcgggactttgtggaggcgccgtcgcagatgctggagaactgggtgtgggagcaggagccgctgctgcggatgtcgcggcactaccgcacaggcagcgccgtgccccgggagctcctggagaagctcattgagtcccggcaggccaacacaggtgcacccgccccgtccggggaagggtgctaacctcggggggcggcacacagctggggcctggcatgtgccccgggtgggggtcggagctctgggcagagtgggccggggcaggtgcagaggccagctctctccttccctcccgcccaggcctcttcaacctgcgccagatcgtcctcgccaaggtggaccaggccctgcacacgcagacggacgcagaccccgccgaggagtatgcgcggctctgccaggagatcctcggggtcccggccacgccaggtagccacccttgagccgggcacaccctggaatttggagcctcagctgcttccctgggaaggtgaagggagttggtccccatgcttcacttagcaagtgcaggagtccctgctggggagccacggagcgcgtcccaggctcctcgggggacagccccagctgagatgcagctgcaggcccagggtcggggacgggtgtgcggccccagcccccaggaggagtgtgttccctggagcctctgctttgaatgaagctggcgttttcctgattgaaatgtatgacacatgctttgtaaaaagcctggagaagtacaggaaggcctaggaatttccgatcctaatgatgagaagtgggccctgtttccatgctcacctgttgtcctgtgtgcatgtgtgttcacacacgcttgcgaggatccagaatttggaaatacagcatgattttaacatgggtggtgttttgctggcttaacactccatagacttcaaaaatctttccaaaagcgttttcagcagcgtggcctgtgatgttgcgtgggcgtgccttgctttattgacgcagtctcaaaatggggactttgctctgtggcagctgacagccccgttaaatgagctcctgtccttccaggagagggggcggagacttgtggccctcgctttgtggctgactctggttctagaagtatccagctggtctcggccctcaccgtgatcctccagcttctccctgttccgggcaggggtctcaggagtctggctggttgtcttctcctggaggaggagcatggggtgggggctacagcgtgaaccctgccatgtgtccgccccaggaaccaacatgcctgcaaccttcggccatctggcaggtggctacgacgcccagtactacgggtacctgtggagcgaggtgtattccatggacatgttccacacgcgcttcaagcaggagggtgtcctgaacagcaaggtacgcggggactggggacagggagggcgtcctgaacggcaaggtacgcggggactggggacagggagggcgtcctgaatggcaaggtacgcggggactggggacagggagggcgtcctgaacggcaaggtacgcggggactggggacagggagggcgtcctcaacagcagggtggggccgagaaaagcacacctttggcctgggcctgggtgtgccgggtgagccatcccggccgaggcacctgctggtcttggtgcggtgctgcccacagctcctccctgggccctgcaggaagctccacactggcccctcaggcctcgggctgtgagtgctgggagctccgtgtcttcccatacgagtccttccgggatctgcgtgatcggcctcagagccatgggctgagacagacccttctctggagaaggcttggcgtttgccattcatttgctcctccaacctccagtttcctcactatgaagtgcggccgttacgccatgtgagcctgtgcctcccgctgacttggtgtgacccaggctcgggacagccgccagagtccctcacaaggaacaggtggctaccagctttgagggccggccctgccctgcctgggtgcaacattgcactgggcagcctgcaggtacctcggagccaccaagcaggcactcagctgctccctttatagaggtgcagaggccaggacctgggggagcaatggtccgacaagccccctgtcttcacagcccagcagggacctcccccctcctgaggcagcctccagcagctccccctgctgctgaggtgagggggtcccacctctgaggaccggccgggggctgtagaggtggagtcccccgggtgggagctgggactgtggctccctggctctgcagcctgcagtccgcgcaggctcctgcggggctctggggcgtcggggtctccttggtggctggcaccggcgcctcgcagtctcatctgcctcacctgcccgtagtcccgcagtcacagggctgggctcaaacctgggcctttagggcggcccagagcgcgagcggcttccacattgtccagccggaggctcagccacttctgttcatgggctcagcctgggatttcagtgggggctgatggcgggagccacctcgggagtttggggagttcggggctctgctggcccctcagtgcacacccccgctctgagattctgatgaaaggcacctgcgctctcccacctgtgctgatgcaggcggcccccgggcctccctgggaacctggaaggggttgctccgaggcccccctgggcgagggtgtgcagactcctggggtcctctgccttcctccctgggtccccacccggccacagtgccctgtctcctcggcaggttggcatggattacagaagctgcatcctgagacccggcggttccgaggatgccagcgccatgctgaggcgcttcctgggccgtgaccccaagcaggacgccttcctcctgagcaaggggctgcaggtcgggggctgcgagcccgagccgcaggtctgctgaggcctggcactgcgactgcccagtctggcctgcgctcccgccgccctggtgccttagcccccggcacaggatggggcaggctctggcacagtgcctgggactggcagggtggctgagcggctgtcttgcctcttgtcattgtctgtccccacccggtcgtggcccacccggctagagacggcgtcctcaaggcatctggagggctttcgtggctgccagggcctggtctttgttgcactaacacgtctcctctctgggaaacgtcccttgtcaggagacggctcttctttgaaatgaggtcattaaaaggaaacagaaaaagagagaggctccctggcctggtcactggctcctgcgcttttttggtccgaggacggtgggacggcgggtcagggtccagccctcgggctgttgccacaccaggccctggattggggctcaggtccttgtgggggcggggggtgggggagtaaagggctgggaaccagttctgccagccaggccggcctggggggtctgagagacttcggcttcctgcatgcttctcacctgttgtcattctggaacattccccccgccctgctcagctctggccatcaaggaccaggctccactggtcagagagtctggaaagtcagggcaggccctgtgcgcacaggcagccggggcggggctgggggtcagcagctgcccaccctctcatccacaggggaaggccgggctcactccagcttcctaggcagagtctctgggggttcctgttggacacaagtgaaccaggtgaaccagggcagctgctggaagctcggccatggccctcatcctcatggccttggggactgcctgtgcctgccctccctggcggccccactcccctggctgtgggcaacatggcaaagtcttgatcgggggtgcagggtcgggggggcgcttcctggaccctccaacagtgctcagagatgcctcagggatagctgtcggctgtgtccccacctcccgagcaagacaagtggatgctccccgtctcttcagtcccagtgctctgatgttttctcccgcgactgtgagtttctcaggagcccccctcgtgccctgggagcgtccctccccagtcttagtcctccacgaaggacgctggtcagcagaacctgtgaccctgcttcccgaggcctatgggtggccagacatccgcctcgtcctcacctccatttggacaggactccgagggctgtgccatctgcttcagcccctcctgtcccattcccacccagcccaggtcagtgtggctgtggccactgccatggggcctgctttgcaccttacgcacgcctggctctgctccatgcacctgcttctgtgtctttccaactctgggggctaaggggtgagtcttgtctttgcagagctggacggcacagcctgtggccaggagggttatgccagcgaggcgggaatccataagtgggaacaccacagtggtcacgtttcagatactcacagctcagagcgggtcccatagcttgcacctgaagccccaactactcaggaggctgaggcggaaggattgcttgagcccaggagggcaaggccagcctgggcaacgtggcaagaccccatctctaaaaaaaataagttcggtgggtgtggggccagtgcctgtggtctgttttttgggaggctgaggcaggaggatcgcttgagcctaggaggtcaaggctgcagtaagccgtgatcccaccactgcactgcagcctgggcaacagagcaagactgtctctaaaataacaataataataaaatacctggggttcagaaaagaaaagctggaaggcaaagccgaccgcactgggcagaggtggagatggcaagtctgggggctccctcatcttcccctgccccgagccctcaggtggcctccacctggtccccagcgaagtcccagttgtgcaagagcaccccagctgggccctgggccatcacagccttgtcacacacacagcctggcccatcacagcagagctggggtcacagccttgggctgctgggccgtgggcggatggcctggaccatccacaccccactcccctggaagtcaccaactgggcttagttgccggataccccaggcagccccccgcggtgcttcgcaagttgggccgcctcccccagcatgtcccctgctctgtggacacccagggatgtggaggtagtagcacagagtctcggtccagggccctgttccccagggagctgggcgtcctcagagccttcccaaatgcccacaccgggggcacccgggtttccccaaacactccaggacagagcgggggctttgatcacagggagggggctgcagagctgctgtgtctcctggctcctctgccccatgctccccactcagggctccagcagtgggctcagaggacagtgtggcattagcatcccctgcccgtccaggttgtcactctccttggccccttgctgctccccagtggaaaaaaaagggggaaataaagaatcgtaaaaaatacatatattggaacctgtatgttttgtgatcttcgcaacatttctctgtaaactctccttctttaggtttttgacaaaacctgaatgcagaagtggtctcctccccagtcacccgtccagcccccgtgggctgtccccaggtgtccctggctcttcatccccacaatcctgtccctgcctgtgctgcctccaacacacgcgccccaggctttgtgcctgtggttccattttggtccttcacgaagtatttctccaaccgagaagctgctgggatctctgtggttggtggccccgagcggccccactcctctcaaggatgataccagtggggccgttgtaggcaggctccatgctgcgggctgggcaggcgcggtcgtccccatcctccccatgggacttgtgttactgtccccgtgtcccagatggggcatctcaggagcagagccagcgtcccccctcctctccccaatgagcaacaccggctgaaggccacagccttgaaagggacaggggcctcactctccagggctgtccctacttcaagggacaaaatgttttgtgaaactcagttcgattctgagattaatggccagcttgcgggtggtttgagccctgggctggaaggcaggaggtctgggttcaagtctccaggtagacagggcccagggatgagttccagcatgggctaggggccagggtgctgcccacgtggctccctggggaactgggctccctgtggccatgcagagagctttctggcttttccaggctgcaccagaccggtgtgatgctctcctcttcagaccccagactgcccttgtgtgttccctcttgccccatcctcagctcaggaggtcagggagacggagctctgtcccaaaggccatcctgtgcccccggccacctctcatcgttggtttgcggatgggctggtgacctattttggagcacctacatcagtgccgtcctccagtctgactcggtttgaacgattagagaattttatttttccctgaacttgaaattgggaggagggaatgctgtcggcacgtggaggtgcttggagtggggcctgccaacccggaggacgctacggctgtgatgaaggctaccccactacatcgtccaagcacctccaacccagtttacggtggggtccggacctgcccctgaacttggcggttatgtgagcctataaattcccagttattatttatgtttttattggctgggcacagtggctcacacctgtaattccagcactttgggaggctgaggcaggcagatcacttgaggccagaagttcaagaccagcctggccaatatgaggaaaccccgtctctactaaaaaatacaaacatttagtcagacgtggtggcccttgccttagtcggtgtgagaactgactaatgcaattagtgagactatattatgaacctttatagtgttagaaataaattttcggtgccacaaaagaaacagcactcgaacattaattttctcagcacggcaattttacttctatagaagggtgcgtctggcaggtggagcccagcgccgcgctgcggggcctgctgggacttgtagttcacaggctcagggtgcgcaggcgcaatgccgagtttgcctctgcgcgagtcggggttggcggcgcctgaacgagcacacctgaacgagggaggagaaggggttcttacccctgacgcaggtacccctactgctgtgttgttcccctattggctagggttggcccgcacagtctaagctgattctgattggctgttttaaagagcaggggtatgagccagagtggcggggtgagtagtttggcaggaaggacggctacagaaaaggtgactcagaatgactaagaacagagcaggtgaccaaggataactaaggtcagagcaggtgacaagggtgactaagaacagagcaggtgaccaaggataactaaggtcagagcaggtgacaagggtgactaagaacagagcaggtgaccaaggataactaaggtcagagcaggtgaccaaggataactaaggtcagagcaggtgaccaaggatgactaaggtcagagcaggtgacaagggtgactaagaacagagcaggtgaccaaggataactaaggtcagagcaggtgaccaaggataactaaggtcagagcaggtgaccaaggatgactaaggtcagagcaggtgacaagggtgactaaggtcagagcaggtgaccaaggatgactaaggtcagagcaggtgacaagggtgactaagaacagagcaggtgaccaaggataactaaggtcagagcaggtgacaagggtgactaaggtcagagcaggtgaccaaggataactaaggtcagagcaggtgaccaaggatgactaaggtcagagcaggtgacaagggtgactaagaacagagcaggtgaccaaggataactaaggtcagagcaggtgacaagggtgactaagaacagagcaggtgaccaaggatgactaaggtcagagcaggtgaccaaggataactaaggtcagagcaggtgacaagggtgactaagaacagagcaggtgaccaaggataactaaggtcagagcaggtgacaagggtgactaagaacagagcaggtgaccaaggataactaaggtcagagcaggtgacaaggatgactaaggtcagagcaggtgaccaaggatgactaaggtcagagcaggtgaccaaggatgactaaggtcagagcaggtgacaaggatgactaaggtcagagcaggtgaccaaggatgactaaggtcagagcaggtgaccaagggtgactaaggtcagagcaggtgataggggctaggaggggttgtttactgaaactaggggcaaggaaacgaaaagaacgaggaagttaaagtttaaaatgaagaacaaagaataggtggccgggcgcggtggctcacgcctgtaatcccagcactttgggaggctgaggcaggcggatcacgaggtcaggagatcgagaccatcctggctaacacggtgaaactccgtctctactaaaaatacaaaaaaattagccgggcgtggtggcgggcgcctgtggtcccagctgcttgggaggctgaggcaggagaatggcgtgaacctgggaggcggagcttgcagtgagccgagatcgcgccgctgcactccagcctgggcgacagagcgagactccatctcaaaaaaaaaaaaaaaaagaacaggggagctgaatatacggaaacattggttctttggagaggagctcataactgattgtacttaacaatttacaggctaaaacctttgaagaggaatttgttgtatcctacaacagtatattaattatagtagttttactattttaatttctcataaataacaatcagtagaatattaaataaatatttaaacaataatttaatttggctgggcgtggtggctcacgcctgtaatcccagcactttgggaggccaaggcgggcagatcactggaagtcaggagttcgagaccagcctggccaacatggtgaaaccgcgtcgctaccaaaaatataaaaaattagccgagtgtggttgtgcacgcccgtaatcccagctacttgggagactgaggcaggataatcgcttgaacccgagggggcggaggtttcagtgacctgagatcatgccattgcactccagcctgggcgacaagagcgaaactcagtctcaaaaacaaacaacaattacttaagcaatcattttaataagtatgtaatacattatacgtttatataacttgcttaataaataatagtagttattaatatccaatggcaagccgccgggaaacgacggagctgggatttgaggattggctccgcgaaccccacaacacccggggactccagcgaaccacacggggtggatccaacagccgcaggggcatcgtggtcctgcggagacgccgcccgcccggaggcggcgctgtgacccaggttggagagtcaggagcccagcgccgcgctgcggggcctgctgggacttgtagttcgcaggttcggggtgcgcaggcgcagtgccgagtttacctctgcgcgcgtcggggttggtggcggcggctgcggcgagttcctgaggggcgcctgcggggggcgtccgctccgagcgccgaggagccgagcggaggaggcgtcccagggacacgcaggggaggccggccggcctgcacggggcgctcccgcctcgggggccctgtctggcgcctcagcgcgcgccccgatggtcacctgcgcccacctgggccggcgcgcgcggctcccggcagctcagccgtaagtgccgccgcctcccgcgccgcgacctccgtgccgggcctgccggggctctggtggggctgggtctggcggggccgggtggccggggcatgaccctgtcgcgatagggtccccacgggagggtcgggagccggcagctcgcccagggccccaacgcccaggatggcacggtctgcccttgccctgtgaaaacgcccctgggtgagagacgcataagctttccgaggcccagcctgcaaggagagggagaagacgcattgactctaccctaaaggcagagaggggctgccacgctcgcactgcagtgaggccacatcagagggtctgagcgaggggcggtcctgccctccaggggacaccgggcgatgtctggggacgtctgtggttgtcataactgggggcagttcctggcatggagtaggtggaggccagggatgcaactcagcaccctgcccagcccagagaatgacccaggctccagtgtccacagcgccctgagggagagacctcacttatacgttagcaccgctgtcctggtgataagacagcaagggtccttttttttttttttttgagacggagtctggagtgcaatggcatgatctcggctcactgcaacctccgcctcccgggttcaagccattgtcctgcctcagcctcccaagtagctgggattacaggcgtatgccaccacgcccggctaatttttgcatttttagtagagacggggtttcaccatgttggccaggctggtctcgaactcccacctcaggtgatccacccgcctcagcctcccaaagtgctgggattacaggcgtgagccaccgcgcagctgcaagggtctattctgtttatacccaccacccatgttgaggaatgagggaggcagctgacctttctgctgctctagcaaccccaacctccctgaactctcccctacccaaacaggttggtttctttttcttcttcttttttttttcttgagacagtctcgccctattgcccaggctggagtgcagttgcacgatctcggctcactgcatccacctcgtgggttcaagtgattctcctgcctcagcctcccaagtagctgggattacaggtgcacgccaccccgcctggctaatttttatatttttagtagatacagagtttctccatgttggccagccaggctggtatcgaactcctgacctcaggtgatccacctacctcggcctcccaaagtgaccactgcgcccggcgcctttggttcttacatgagcctcctggagctgctgtgacaatgcaccacaaaccagggggcagggggaggcttgaaatttattctctcacaagtctggaggccagaagcccaacatgaagatgtggtggggccgtggtgcttctgaaggctctggcgggaggatcttctctgtctcttccagcttctgggggtggcctgccatagttggtgtcccttggcttggggccacatcactccaagctctgcctgcatcatcatgtggccttcttccctgtgtctctttctccttttttgtttttatttttattttttgagatggggtctcggtctgtcacctggctggagtgcagtggcacgatctcggctcactgcaatctctaccccacaggatcaagcaattctgcctcagcctctcgagtagctgggattacaggtgcacgccaccacacccagctaatttttgtatttttagtagagacgggggttttgccatgttggccaggctggtctcgaactcctgacctcgtggtctgcccgccttggcctttcaaaatgctgggattacagacgtgagtcacctagtccagctgtctctttctcttataaggacaatactcatgaccccagtagctggaagaggcggaaggatttttcctgagagcttttgtttcttcttttccttatcttttctttttgagatagagtcttgctccattgcccaggctggagtgcagtggcacagtcttggctcactgtaacccctgtctcccaggttcaaataattatcgtgcctcagcctcctgagtagctgggtttacagggatgtgccaccacacctggctattttttttgtatttttagtagacgaggtttcaccatgttggccaggctggtcttgaacccctgggctcaagtgatcctcgcgcctcagcctcccaaagtgctgggattacaagtatgagccaccatacccgagcttttccctagagccttcagagggagtacagccctgcccacaccttgatctcagacttccagaactgggaaaggatatattcctgttattttaagcccccgggttactggcaccttgtgaaaacagcctcaggaaatgcatggagcgcttcacttcctaatggagcctgggtgttttgtaaacttgtttgcttccaagggcctcaggaccttcatccataaaatggggcctttaagacccctggccatggatgtgtgtggcgtctcacacctttaatcccagaatttagggaggctgaggaaggtggatcccttgagcccaggagctatagacctgggacaacatagcaaggccccgtctctacagaaaatacaaaaaattagccggacatggtggtgcctgtagttccagccacaggctgaggtaggaggatagcttgagcccaggaggttgaagctgccatgagatgagctatgattgcaccactgcactgcagcctgggcaacggagggagaccctatctcttaaaaaacacaaaccctggcttcagtcctgggttctggcttcagtttacctccctctgtgtatggggggccccttcaagcaaatggaggttctccaggccaagggctctgggatctggggactggcctggatctggtattcgcagcgcctttttcctccccacagctctgcctgcccaggaacctgcttttcccaagaggagagaatggctgctgggtacctgccccgctggtcccaggtgagatgtcctcattctcccaaagggcacccagtatatccagagggaacaatcccaccagaaactcagtcctcgatagaggagaccccttgctatgtgaaagttcaggagaattccccaggagtggtgtgtgggatgaggtactcctgctgctcccaggtgtaaagagtgaccctcagtattgggactgagcacagcctctccctaggagacagtattacgggatccctggggtgtcagtttttctggctggaaacctctgtggctgtggtacctttgcccaagttcttgtcctgcatccaagaagaatgaggtatacagacaagtgaagggtgaagaagagttgtatttactgttagagcagctcagaggattgagcagctcctccctgttggcaggttgtctggtcgagtgttcagctctcagcagagaggaggcctaggagagggtggctcctctccacaggcaagtcattcggacgtctctgcaggtctctgaagctctcagcagggacggtagctcctctctgaagctctcagcagggatggtagctcttctctgccggcagatcatctctgcagccttcagtggagagggtactcctctctgcagctggtcgtccggtcccatcctgtcatctgtctgccttctttgtcctctggccgtcctctgccctgctaagcctgagcccagggcttttacggacctcagaggggaggaagtgtgtgccgactggttcatgggcggccatgggagggtcgaaagaggcaccatgagtccccactctggtctgtaggactggcagcctggcccccagtcttcaggccctccctggcctgaaggtggggccttactggggacccacccccttctgcccaggaattaatctgcctcctgctgccattcacggccctaggacttggcccaaaccccactctgagagaggccaggcagtgggagcagacacccctgaacctgcagggactagggagtccttcctgagactcctgagggtgcaggttgcagagatgcctgggtcctgcgcctgggaggacagccacggctgcacccaggagctcctgcctcgcccacttggaggaggcagggctctcacttgtctccagctcctgcctgcttcctggagtgcgaggcccaggtctgcagctgcgggtctggcagcttcagctgcacccaggagggcagatcctgcctcttctcagttcccccaagagcacagggaggctcgaatccacagctacaggaggacggggctcccactagctccatggagtgtgcagccccggtggcacctccctgctgctgctgacatgatggcatcagccactgccatcaacaggtgggatccagcaccttcccctggagagcaggcagtgctgcccaggaaggcatcctcctctttacctgaaagaatatttctgtaactgtgataaaacacacatgaaatacatatgaactttaccatcttagccgttgataaaacacacatgaaatacatatgaactttaccgtcttagctgttgataaaacacacatgaaatacatatgaactttaccatcttagccgttgatgaaacacatgaaatacatatgaactttaccgtcttagccgttttcaagtgcacagctcaatggcattaagttggacaaccatcaccaccctcctctctagaacttcctcctcttcccaaactgaagctctgtccccatgagacactcattccctgtccccctccccagcccctggtaccccccatcctactttctgtctctctgaatctgacaactctagggacctcctaggagtggaaccacacaggctttgtccttctgtgtctggcttctctcactgagcataacgtgattgcagttgtttttttttttttttttttttttttttgagacaaggtcttgctctgttgcacaggttggagtgcagtggcgcgatcttggctcactgcaacctctgccgcccaagctcaagctattcttgtgtctcagcctcccaagtagttgggattatgggcatgtgccaccatacccagccaatttttgtattattagtagagacggggtttcaccatgttggcccaggctggctgtgaactcctgggttcaggtgatccacccaccttggcctcccaaagtgctgggattacaggtgtgagccaccacgtccgccctctgcagttttatttaagacagagtttcgctctgttgcccaagctgaagtgcagtggcacaatctcagctcacgctgagatcccacctcccgggttcaagcgattctcctgcctcagcctcccaagtagctgagattacggcactcgccaccatgcctggctaatttttgtatttttagtagagacagggtttcaccatgttggccaggctggacttgaactcctggcctcaaaggccaaagtgctgggattataggcacatcctggagtgggatttttaaaatattttaaaaattttttgtagaaactgggtgtcactgtgttgctcagtctggtcttgaactcctgggctcaaacagagtcttcccagcttggcttcccaaagggctgggattaccagtgtgagcaaagtcggaagagtttgttttttttttccaggatgcaactgaagagggagaggtgaaggcataagacaggggtggactgaagcgagtccatacagggcccttaaggctgggattgaaagctcagggtgcctcctgtatgcctatggttcaggtgctagaagtggttctacatcttttctttctttctttctttttttgagatggagtttcactcttgttgcccaggctggagtgcagtggcgtgatcttggttcactgcaacctctgcctcccaggttcaagcaatgctcctgcctcagcctcccgagtagctgcaattacaggcacccgtcaccacgcttgactaattttgtatttttggtagagacggggtttctccatattggtcaggctggtctcgaactcccaacctcaggtgatccgcctgcctcggcctcccaaagtgctgggattacaggtgtgagccaccgtgcccagccagtaactttttttttttttttttgaaatggagtcttgctttgtcacccaggctggattgccgtggcacaatctccgctcactgcaacctctgcctcccggttcaagcgattctcctgcctcagcctcctgagtagctgggactacaggtacgtgccaccacgattggctgatttttgtatttgtagtagagatggggtttcactatgttggccaggctggtcttgaactcctgaccttgtgattcacctgcctcagcctcccaaagtgctaggattacaggcatgcgtcacagtgcccagccaacttttacatcttacagcagataccagcttacgtgctgttttataccatggattacctggatagccattcaggccctaaacactcatcagccccttcatatgttgaaacaacaaagcttttgccatatttcagtgggtcaaggttgttgtagcagattcctctttttttttttttttgagatggagtctcgctctgtcgcccaggctggagtgcagtggcgtgatctcggctcactgcaaactccacctcctgggttcatgccattctcatgcctcagcctcccgagtagctaggactacaggcgcccgccatcatgcccggctaatttttttgtatttttagtagagacggggtttcactgcgttcgccaggatggtctcgatctcctgacgtcgtgatccacccgcctcggcctctcaaagtgctgggattacaggtgtgagccactgcgactggctgcagattcctcttcttacattgtccatgccttgtaatgtgtaactctgagtcatggaagcaaagagaactaatctctaataactgtgagttttgaggaaggtcctgttccatcctgctttttgttgggtattgcttctcagtcttctgactatggcaatagcaaatgctgtgactgatattaactagttagtcctcacgacaacacactttggataaaattcttctttccattgaacagatgaggaggctgtgtcctggataggtcagcaatatacctgcagtcccataacttgcaagtggcatatccatgacatccattcattttcagaatcagcagggggagattctcacatgggaatgtcaggctcagagatccagaggttagaatcaccagttcaataagaaatgggcaaaatgtttcatccagacctgtgtgctggtcgtccttgttgtgttgatggtgggcctagggtctgtatgtccctctgattttaagccaaggacaagcacccacaaggcagctagtagaaactgacttatggactttgcaccttgacctttctcaacttccctggtgccaccaacctcacccctcctcccatgaacgtgggtggcgatggacccatcttgagcagaactgctgtgatattctaggaattagtaacctttgaggacgtgtccatggacttctcccaggaggagtgggagttgctggagcctgctcagaagaacctgtacagagaggtgatgctggagaactacaggaacgtggtctccctgggtaaggcaagcatcactaattcctgtgttcattgattcacatttatctggtgtattagtctgttctcacactgctaataaagaaatacccaagactgggtaatttgtaaaggaaagggggtttaatggactcagttccacatggccggggagggctcacaatcatggtggaaggcgaatgaggaacaaagtcacatcttacgtggcggtaggcaagagagcttgtgcaggggaactcccatttgtaaaaccgtcagatctcgtgagacttattcattaccacgagaacagtatggggaaaaccacctccgccatgattcagttatctccccctggctccacccttgacgtcgggattattacaattcaaggtgagatttggatggcaacacagccaaaccatgtcatctagcatctactatgtgtctggcaccatgctgggaatgggggattcattggtaagtaagacagacatgggtcctggttttgtggctttcgtggtctggtttctctgagaacagatgaccttacttgttcagtacgtgatagctggagctgcagtgcaattgcatgtctcagctcaggcatagataacttctctgattccccttgggaacaaagtcagagtgtcttagtccgtttcacactgctataaagagtaccacctaggctgggtgtggtggctcatgcctgttatccaagcacttagggatcacaagggtgatcacctgaggtcaggagttcaagaccagcctggccactgtggtgaaaccctgtctctactaaaaatggcgggcacctgtaatcccagctactcaggaggctgaggcaggagacttgcttgaacacgggaggcagaggttgcagggttgcagtgagccaagattgcaccactgcactccagcctgggtgacagagcaagactccgtctcaagaaaaaaaaaaaaaaagcaagaaaagaggtttaatggagtcacagttccacatggctcgggaggcctcaggacacttacaatcacggcagaaggggaagcaggcaccttcttcaaaaggcagcaagagagggaagagagcaggggaaaccttataaaaccatcagatctcatgagaactcactatcacgagaacagcatgggggaactgcccccatgatctcatcacctcccatcaggtacctcccttgacacgtggggattacgattggagattacaattcgaggtgagatttgggtcgggagacagctcaaccatatcacagagcatttgtactctttctgccaaggtaaagagccatcattaaaaaaaaaaatgtttttactgtgataaaaaatgtaggctgggcgtggtggttcatgtctgtaatcccagcacttcaggaggccaaggtgggtggatcacttgaggccaggagtttgagaccagcctgaccaatgtggcaaaaccccatctctactaaaaatacaaaaattagctgggcatggtgatagacgtctgtaatcccagctacttgggaggtcgaggcatgagaatcgcttgaacctgagaggcagaggttgcagtgagccaagatcgtaccactggactccagcctgggcgacagagcgagactctgtctcaaaaaatatatatacagcagtggctcacgcctgtaatcccagcactctgggaggccaaggcggggtagatcacctgagagaccagcttgaccaacatggagaaaccttgtctctactaaaaatacaaaattagccaggcgtggtggcgcatgcctgtaatcccagctactcaggaggctgaggcaggagaatcgcttgaacccaggaggtggaggttgcggtaagctgagatcgtgccactggactccagcctgggcaacaagagcaaaactccctgtcaaaaaaataaaaaaagtatatatacatatatatatgcacacacgtatctatctatatatctctatataaacataaaatgtgcctttttcaccccttttaagtgtgcagttcagtggcactaaatgcattcagcatgtactacagccaccacaactgtccatttccagaacttttatcctcaaccaaaactctgtacccgttaaattctccctccccagcccctccttcagccccttgtaaccatgagtcactctccatctctatggatttgcctaccctggacatttcttttcttttctttttttgagacggagtctcgctctgtcgcccaggctggagtgcagtggcgtgatcttggctcactgcaagctccgcctcctgggttcacgccattctcctgcctcagcctccggagtagctgggactacaggcgcccgccaccatgcccggctaattttttaataattttttgtatttttagtagagatgggatttcactgtgttagccaggatggtctcaatctcctgaccttgtgatctgcccacctcggcctcccagagtgctgggattacaggcaggagtcaccgtgcccggcagacatttcatataaatggaatcatataatatgtggccttttgtgtctggctgatttcactgggtgtgatgttttcagtgttcatttacattgtagcctgtgtcagtgctttgttcatagatgaagaagattccatcgtgtgtatacaacacgctgtgtccatccattcaccagttgatggacgcctgggtttccacctttccgctgttgtgaatcctgttgctgtcagcattggcaaacaagtatctgtttcagtcactgttttcagtgctttgggtcaatactaggagtagaattgctggatcatgcggtaattctatgtttagaatttagctttttcaggaactgccatactggcttttcttttgtttttttgttttgagacagagtctcactttgttgcccaggctggagtgcagtggcactctctcaggtcactgcaacctctgcctccgcagttcaagtgattctcatgcctcagcctcccaagtagctggaattacaagtgtgcaccaccacacctgtttttgtatttttttttttttatgagacggagtttcgctctcgttgcccaggctgaagtgcagtggtacaatctaggctcaccacaacctccacctcccaggttcaagcgattctcctgcctcagcctccccagtagctgggattacaggcatgcgccaccacacccggctactgtttttgtatttttaatagagatggatttttgccatgttggccagggtggtgttgaactcatgacctctagtgatccacctacttccgcttcccaaagtgctgggattacagacgtgagccactgtgcccagccccatactgggttttgtatcagcatgtatattttccattcccaccagcagtgcagactgttgcaatttctccacatccttggcaacacttactattttttattatggcctttctaatatgtgtgaagtggtatctcattgcggttttgatatgcattcccctaatgaccaatgacatcgagcatccattcctgtgtttattgaccatttgtgtatcgatttttgggggaaatgtaagatctgtaattttttttttttttttactctgtcgcccatgctggaatgcagtgctgcaatctcggctcactgcaagccctgcctcccgagttcatgtcattctcccgcctcagcctcccaagtagctgggactacaggcgcctgccaccacacccggctaattttttgtatttttagtagagacggggtttcaccgtgttagccaggatggtcttgatctcctgacctcatgatccacccgccctgccctcccaaagtgatgggattacaggtgtgagccactgcacccgccctttttttttttttttttttttgagacagagtctcactctcattgcccagcctggggtgcagtggtgtgatcacagctcactgcagccttgacctccccagggctcaagtgatcttcccacctcaatctcccaggtagctgggactataggcttagaccaccacacctggctagtttttttgtttgtttgtttttggtttttttttggtaggtccggggtcttgtcatgttgctcaggctggtctcaaactcctgtgttccagtgatcacctgcctctgggcctcccaaagtgttgggattacaggtgtgagccaccacgcccaaccagatctgtaattttttttttctttgagactgagtcttgctctgttgcccaggctggagtgcaatgccacgacctcggctcactgcaacctctgcctcctgggttcaagtgattctcccacctcagcctcctgagtaactggggttacaggcatgcaccaccacgcccagctaatttttgtatttttagtagagatggggttttaccatgttggccaggctggtctcaaactcctgacctcaggtgatccgcctgcctcggcctcccaaattgctgggattacaggagtgagccaccatgcctggcacagatctgtaattttttaactagaaaataaaatcattatcttgtgctacctctcaagtatactcttgtctttttcagaagccttgaagaaccaatgtactgatgtggggattaaagagggtccactttccccagcacaaacctcacaagtcactagtctttcctcatggacggggtatttactttttcaaccagtggcttcttcccacttggagcaaagagaagccctgtggatagaggaaaaaggaactcctcaagcctcctgttcaggtgagaatcaggcagatagaaaccattgggatggcagtggcatcgtgggaaacattggtcagagagctcttcacaaggccctgattctgtaaggagaatgccaagatccctttctcggacaccttcagttcattttctggcagctttctccttctctttactaccttacatgacctctctctggatacagagaaaagagtatctcattttcttgttttatttatttatcttaagacagggtctcactctgtggcccaggctggagtgcagtggcatggtcatatctcactgcatcctcaccttcctgggctcaagtgatcctcctgcctcagtctcctgagcagctgggactataggcacatgccatcactcccacctattttgtttttctcagagatggagtctcactgtgtttcccaagctggtcttgaattcttggactcaagtgatcctcctttctcagcctcccaaagtgttgggagtacaggcatcagccatgactcctggccccattttcttctattttttccccccattttcttcttgaagccattttgcctatgtttctagttgtctcttccctctttgctttcttgataattctttctctctgccagacatattctcccagcttaacagggtaatttctttctttttttttgaaacagtctcgctcttgttgcccaggctacagtgcagtggtgtgatctcggctcactgcaacctccacctcccaggttcaagcgattcttctgcctcagcctcttgagtacaggtgtgtgtgccaccacgcctagctaatttttgtatttttaatagagacagggtttcaccatgttgatcaggctcaaactcctgacctcaggtgatccacctgcctcggcctcccaaggtgctgggattacaggcgtgagccactgcacctggcctacagagtaatttctttctgcattgatatttccctgccttttcccatcactgtcaatcttccactgctgcatctcatcctcagtggccttccttgccacccatctctctttttcccatccttcccgcatgttcagagttgatatttgaacatcagtccgcacaggccttgtagatgtcagaaggacttctgtcccgctggttttcaagtagctgtttcttcttctaaaaaaatggtttccgcctcaatttatttcagattggatgactgtactaagaaaccaagactcaacttacaagaaggtggctttgcaggaggaaccagccagtggtataaatatgataaagcttatcagagaagatgggggatggaagcagttagaggacagccatgaagacccccaggggcttttgagccaaaaggcatcccttcacgtagtggccgttcctcaggagaaggctactgcatggcatggatttggggaaaatggtaatctgagcccagcccttgttttatcacagggaagctctaaagggaaccacttgtgtggcagcgagttagatattacaagcttggcatccgattcagtcttaaaccaccatcagctgggatatgcagatcggagaccttgtgaaagtaatgaatgtggaaatgccatccgccagaacagtcactttattcaacacggggggaagatgtttgtgtatttggaaaatgggcagtcattgaaccacggtatggccctgactatccacaacaaaatcaacacggcagagaaaccctttgagtgccaccagtgtgggaaggtgttcaaccggaggcattctttgagcgaacatcaaagaattcacacgggggagaaaccctacgagtgtcaggagtgtgggcgagcctttacgcacagctccaccctcacgcgccatctgagaactcatactggagagaagccctacgggtgcggtgagtgcgggaaagccttcaacaggatctcatcgctgactcagcatcagaggattcacaccggggaaaagccctataaatgtgaagactgtgggaaatccttctgccagagctcttacctgatcttgcacaagaggacacacaccggagagaagccctacgaatgcagtgaatgtggaaaggccttcagtgaccgttcctctctcaaccagcacgagcgaactcacacgggcgagaacccctatgaatgtaagcagtgtgggagagccttcagccagaggtcttcccttgtgaggcacgagagaactcacactggagagaaaccctacaggtgtcaggaatgtgggaaagccttcagccagagctcatcccttgtcacacatcagaaaactcacagcagccagaaaacctataaaatcattgactgtgggaaagcgttctaccagaacagacatcttattggatattagcaattgcacgctgctttgtaagccactttttagtactctgacacatacatgtggttatcttttgccctgttgtgatggataatttgaaaagaagtgggtttatgtcaccttctcaccttcttataagaaagctctgagaatgggcatttttgtattttgttgttgttgttgagatggagtctgccacccaggctggagtccagtggcgtgatcatacctcactgcagcttcaacttcctgggctcaagtaatcctcccaccccagcctcccaggtagctagtactataggtgtgcaccaccacgcccagcaaatttttaaatttattatagagtgggaggcagggtgcggtggctcatgcctataatcctaacactttaggaggccgaggcgggtggatcatgaggtcaggagatcgagaccatcctggctaacacagtgaaaccctgtctctactaaaaatacaaaaaagtagccgggcgtggtggtgggcgcctgtagtcccaactactcaggaggctgaggcaggagaatggtgtgaacccgggaggtggagcttgcagtgagccgagatcgcaccactgcactccagcctgggagacagagcgagactccgtctcaaaaaaaaaaaaaaaattatagagttggggtcttgctacattgccaagactggtcttgaactcctggggtcaagcatcctcctgtcttggcctcccaaagtgttgggattagaagcatgagccgctgtgcccagcctgacggggccttttagtgggaggagttgccattacactacgtccagtaagctccagactttcggaaaagattggtggacgggaatgctgtcatggatgggatcttgccaagaaccatcacgtgttaatttagttgcttaaacaaaaggtgttctgtttcttaactacttctgtgtctttactttttatttcattgttcattgtttttattttaatattcttttctgggtttatatgagacgagttttcactctgttgctgaggctgaagtgcagtggcgtgatcatagctccctgtagtcagccttcatctcctggactcaagcaatcctcccacctcagcctctccggtagctgggactacacatgtgcaccgctaccacacccagctaaattttttttttgtatttttgtagtgatgggctttcaccaggttgcccaggctggtctcaaactcctgagctcaagcaatccacccaccttggcctcccaaagtgctggtattacaggtgtgagccaccgtgctggtattacgggtgtgagccactgtgctgggattacgggcgtgagctgcccatgctgggattacgggtgtgagccaccgtgctggtattacgggtgtgagccaccgtgctgggattacgggcgtgagccactgtgctgggattacgggcgcgagccactgtgctgggattacaggtgtgagccaccctgctgggattatgggtgcgagccgccgtgctgggattacaggtgtgaaccactgctcctggcctttatttcagcattctgtttcagtgtttcacattggccacttagctagatccgtttgtcttctgcagtactgtgctgatccagagtatatgctaagacggaaagcgctttggaggtaaagtttaaaaaatacaagggcttcaaaatagtactagtaatttgatccattcacaaaaggacaaaggctggacagagacgtgaagaaatgaatcatttacgcaatgattggggtgttccaattatgtgtgattttgtgttttctgccgtttcattttgtattgccataatcattttgacaatgaatacaaatcaaatagcacccaaaattgtgaaggatacggaacctcattgatgagtcaggatagactgtgggtacctagatggtagagacatagtatagtagactttgggacatagagggtggaatgacctttggtggcctgggaaaagtcccgcctgtgagatgtccctagcaaaatcaagaccaggagtgctgatgtgcattatcgtcatgaacatgtattggatgcttactgtataccaagcaccagccaagtacttccatgtggttcttcatttagccctcacgaccccatgagataatcactattcacattccattttacagaagacaaaacggaaataatttgctcaaggtcacacaattagaaaggagtagaatctgggctgggcacagtggctcacacctgtgatcccagcactttgagaggctgaggtgggtggatcacttgaggtcaggagttcgagaccagcctggccaacatggtgaagccccatgtctaccaaaaaatacaaaaattagggaggccgagatgggcggatcacctgaggtcaggagttcgagaccagcctgaccaacatggagaaaccgcatctctactaaacatacaaaattagccggcatggtggtgcatgcccgtaatcccagctactcggaggctgaggcaggagaatcgcttgaacccgggaggtggaggttgctgtgagctgggacagtaccattacactccagctctgggcaacaagagtgaaactctgtctcaaaaaaaaaaaaaaaaaaaaatctgggcgtcgtggtgcacgcctctaggcccagctattcaggaggctgtggcatgagaatagctgatgtttcagtgagccgagatggtgccattgcactctagcctgggtgacagtgagactctgtctcaaaaaaaaaaaaaaaaagtagtggactctggatttgaccttgagcaccctgtacaaagccacacctcatttgccaggccaccaagcaggggaactgttttccaaatgttctcttggaaagctgggtgtagtggctcacaactgcaatcccagtattttgggagcctgaggtgggaggatcacttgagcccaggtgttcaaaaccagcctgggcaacattgaccctgtctctgcaaaaaatacaaacattagccaggcatggtggctcacgcctgtagtcccagctactctgggggctgaggtggaaggaccgcttgagcccaggaggctgaggctgcagtgagctatgagcataccaccgcactgcagcctgagtgacaaagcaagaccctgtctcaaaaaaattttacaaattttctcttaggactcatctaactttcctgtgaatgttccctttttccttgagctaatgagggaggttgcccgtcagatctcctttcacccaaatggaacatgttgcttttccttagagatccttgatccatggtcagtctagaccctattgggttgatgagtaagtttctttaggggctctgtgaacaactttgagaacaactttgtgtgctggtgcattgatgtgttttttggggaaagcatctgtaacttccagcatattcttgagaagggttgacttagaagtctcctgactgtactgttttcagtcttgttatctccctccagcaattatattttattttttgagatggagtctcactgtgttgcccaggcaggagtgcaatggtgagatttcggctcactgcaacctctgcctctgggttcaagcgattctcctgcctcagctcccaagcagctgggactacaggcatgcgccaccacgcccggctaattttttttgtatttttattagagatggggctttcaccatgttggccaggctggtctcaaactcctcacctcaggttgtccacccacctcagcctcccaaagtgctgggattagaggcgtgagccaccgagcccgggcacactatttttaactggaagctgctttcctatgtcagtcctctaaacattaatttttataaaagtgtgtaaaaccttcctaggaaagataaaaataaattttaaaaattgtttctaaatgaaatgtcaatatcagaatttgaacaaccacttaagctatggagttttctgaaatgaataaccattaactgtgtttggttttcagcccctgtctattaagtgtattcagtgttttcaggcctatcacaatcgtttttcctttttttaaaaaaaattgaaggctgggtgtggtggctcacacctgtaatccaagcactttgcaagtccgaggcaggtggatcacctgaggtcaagagtttgagaccagcctggccaacatggtgaaacctcatctctactaaaaaaataaaaattagtaggccaggcgtggtggctcacacctgtaatcccagcactttgggaggccgaggcgggtggatcacataaggttgggagttcgagaccagcccgaccaccacggagaaaccccgtctctactaaaaatacaaaattagccaggcatgatggcaggtgcctgtagtcccagctactcgggaagctgaaccaggagaatcgcttgaacctgggaggcagaggttgcagtgagccgagatctcgccattgcactccagcctgggcaacaagagcgaaactgcgtctcaaaaaaacaaaaaacaaaaaaattagctgggtgtggcggggcaggtctgtagtctcacctactcggaaggctgaggtacgataatcacttgaacccgggaggtggagtttacagtgagtcgggatcctgccattgcactccagcctgggtgacagagcaagactgaaaaaaccaaaaatttaaaaaaaaaacacttccctcctaaggttcaatccaattcatttaaacttttgcgtgtttttcttatatcagttaaaatagggattcaatatccttagaaatatagccttttctgttttaaatataacatctaaaaattgtagtaaaatacaaataacaaatatttaccatgttcatcatttttaagtctaaagttcagtggcgttagatacgttcctgttgtgcaatattatagacttccttttttttttttttttttttttgagacggagtcttgctgtgtcccccaggctggagtgcagtggaatgatcttgactcactgcaacctctgcctccctgggttcaagcgattctttttgtttttgttgttgttgtttgtttgtttgtttgtttttgagacggagtctcgctttgtcacccaggctggagtggtggagtgcagtggcgcgatctcggctcactgcaacctctgcctcccgggttcacgccattctcccgcctcagcctcccgagtagctgggactacaggcacccgccaccaggcctggctaatttttttgtattttttagtagagacggggtttcaccgtgttagccaggatggtctcgatctcctgacctcgtgatccgcccgcctcggcctcccaaagtgctgggattacaggcgtgagccaccgtgcccggcctcaagcgattctcttgcctcagcctccctagctgggattacaggtgcgcgccaccacgcccggctaattttgtatttttagtagagacagggttttgccatgttgggcaggctggtcttgaactcctgacctcaggtgatccgcccgcctcggcctcccaaagtgctgggattacaggcgtgagccacagcgcccggccagcttttcaatcttccaaattttggggggatgtacttaaaaaaatgatctgaaaacattttccttagagtttaaaatatgaacttgagagtttttttgttttttaatatggagtctcactctgtcgcccaggctagactgcagtggggcgatctcgggtcactacaacctccacctctcgggttcaagcaattctcctgccccagcatccccagtagctgagattacaggcgcccggcaccacgccgggctgatttctgtatttttagtagagaaagggtttcaccatattggccacgatggtctcaaactcctgaactcagatgatccgtccacctcggtctcccaaagtgctgggattacaggcgtgagccactgcgcccagccaaatgtgagggttttaatgaacatctcatatcttctggttgatttgagcaaagctcctgccccctgccaggctttgggttcggcctcccccagaccgggtctccggattcgcagccccctgggcggggtctccatgtcgcccgcagcgcgatgacgtcacgtctgcgggtcccgcccccacgtaggtctcggcccttcggacccggcgcccagcccccgttcgccctgccaggcccgggccgcccgcttgcatccacctcctgtccggacaaggggtcgcctcgtgaggaaactagtctggagttcccacgcccgtcccggaggaggacgcgggcggggcgcccgaactgcggggagagggcgattccgccccgggctgaaaccagttcgcccagaagccagtgtccccgcagggcgggacagccacgcgtgttcgcaacgctcccgtcactcaccggcagggggtgggccctagggaactacccagtcaggacgggcgggggcggggccgagacaagtatccaatgagggacgcccaatcggaatccggggaactgcccaatttacagcgccaggggacggactggggaattctccaatcagagtcgccgacgttggcagcactgtccaatcagaagcgcggcttcccgagctctgtctaatcaggcccctgggacgggacgcctctgtcctagccgtgagtgccccgcctgcccctagcggtccctggcgtcccggttcctgtcgcgctcacctgcgccggtagcgaagaaatcgccccgggacatggtgagtgtggcgcaggagaggatcccggtgcggggcagcaggaaccggcgaccgcccgagaccgcggcttggggggagctgagggacgcggggggcggccccggcgagggcggcgcaggacgggagcctgggccccgggggtcccgcccggccccgcctcccgcgctgaggtcgcggctagggcgctccgagctccgggtccccgcccgcctctggccccaaggctgcagagcggggagcggcgcccggagcccgactccgtccccgtcgtcccggggtccccgcgtccctgcgctcccgaccccccacgccccgcccggggccgcgacgcctcggagcgtttcgctgcggcttcgggacccccgggccgcgggaggcagagtcgcccgagaccccgaggtgcggtccaggctcccccgggacccgccctggggccgacgccgcggtgcctcctggggtgcgggtccctggtcggtgccgcctccgctcgcgctcccgcggctcagctccttggaggccccgcgcctccggccgcggtctctgggggaccctgggttcctcccgggacagcccgggagcggtggggcctcggcgggggcggagacgcccccacctgcaaaggcagcccctggggcgtgcgaggtttcctcccctgagtcccggttttccttcttgaggacttcttgtcccctctgaccccaagatgcctggggtaggtaaggggaaaaaaaacaagggttcctggtccctgggctctcacacacaaggaagaaaagtaactgaaaagactagagaaacaagggagagcgaggaccccaaaagcaaacgcacgcagacccacagcggggacgcccgggaggctggtgcattagtgtcctcggactgctgtagcaactgactgcaaacgagggggctaaaaccacggaaatatattctttcacggttccctagaaagtgtggatttgaagacgtttctcagttctgttttgagtactagcaatgggattccttgctgaggcaacacctgagttgggggtgggagggcgtccgtcgtggtagcctggccagacttgacccctccctgggtttgtcactgtgaaaagattttccttttttcgagtcagcagtttttaggaagtgaaacgtacatttaattagtagaagttggaagataaaatatttccaggccgggcgcggtggctcaagcctgtcatcccagcactgtgacaggccgaggggagcagattacttgaggtcaggagttggggaccagcctggccaacatggagaaaccccgtctctgctagaaatacaaaaattagctgggcgtggtggcgggtgcctgtagtcccagctactcgggaggctgaggcgggaaaatcacttgaacgcagaaggcggaggttgcggtgagctgagaacgcgccattgcactccagcctgggtgacagagcgagactccgtctcaaaaaaaaaaaaaaacttccaacggggtgaatttcaggaaaaaaattaaaatctgtgtcttacattccatttgttaaacattccctggagtgtgtgtcgtttctcagatctgttattttctgttttcttttattactattatttttttgggagctctgttgcccatgctggagtgcactggtgcgatcacagctcactgcagcctccacctcctgggctcaagcaatcttcctgcctcagccttctgaacacagggactccaggtgtgtgccgccatgcctaagcttttgtatttttttgtttctagggatggggtctcattctgttacccaggctggtctcgaactcctgagctcaggtgattctccctcctcgaccagccttgttcttttcttttgaatgacaataaataggattccagggcctaaacttcaaaatgttactggggagaagagtctcagagaaacagagaaaatctcctttccaccatacgtgcagaaaaatgaatacattgccacgaaacatgttgcagataaattatacaaatttaccaaaatatgttattctccttgacatggtagagaatttttgacggtggatgattctgttctgcttccaatactgcagtacccttaccttaattctataatacattttttgttgttcctgaaataggtagaatacaagatatttttcttgtttagatgacaatttgtcccagctccttatattaaagtgtttatcctctgcaatgccggccctggcactgatcagatttccccgaacacaggggctgcctcagggctgtgtccctttactttgtttttttgttttgttttgttttgagacagggtctcgctctattgcccaggctagaatgcagtggtgctgtctcggctcattgcaatctctgcctactgggttcaagtgattctcctgcctcagcctctaaagtagctgggactgtaggcacctgctaccatgcctgcctaatctatctttcttttcttttcttttttttctttctccctctttcctttctctctctctcttttcttttttttttttttttttttaaagagggagtttcacccttttcgcccaggctggagtgcagtggcaggaacttggctcactgcaatctctgcctcctgtgttcaagcaattctcctgcctcagcctcctgagtagctgggattacaggcatccgccaccacgcccagctaatttttgtatttttagtagaaatgggctttcaccacattggccaggctggtctcgaactcctgacctcagttgatctgcccgcctcagcctcccaaagtgctgggattacaggcgggagccactgcacctggccatttttatgtatttctagcagatacagggttttgccatgttggccaggctggtctcgaactcctgacctcaggtggcccgcccgcctcagcctccccgagtgctggaattataggtgtgaaccaccatgcccccaaccagggtgttttaaaattggcggctggtcacagaggtcccctgtgcctggctgtgccaagatttcagacacccaggaggaaagcagatctttagggtaaacacattgttgcataaacagtttcagcacaataagcaactcctctattgggatgagaaccctccccaaatccaggctagcttatgccagccaagggccaactttgcaggcaggactttctaaggttaggggccctcaggcctttgggttggctcttcctgcgtccaccccctagcccactgcacaggtgtctctaccacagaattattatgggaggcccctatgaagtaggaggagaccacactgcagtaatgatttcacttgtgctgtttagggctcctggacttagccaggtaaggtaaattccattggctgcaatggaatcattatttttttaatttccatttttatttcagattcatgggcacatgtgcaggttacaagggaatattgcatgatgctgagatttgggcttccattgagcttgtcacccagatagtggacatggtagccatgaggaagggtgtcagccctttccccctctgtccctccatttggaatccccagcgtctattgtttccagttttatgtccatgtctacccaagatttacttcccacttataagtaagaacatgccatatttggttttctgtttctgcatgagtttgctgaggataatggcctccagctgcatccatgttgctgcaaaggacatgatttcgttcttttttatggctgtgtagtattccatggtatagatggaccacattttctttagtgcactgtctttggtcacctaggttgattccatgtctttgctattgtgaatgctgctgcagtgaacacacaagtgatgtgttttttggtagaatgatttcttttcctttgggtagatgcccagtagtgggattgctgggttgaatggtggttctgtttttagttctttgagaaatctccatactgcttttcatagaggttgtactaacttacattccctccaaccatgtgtaagcattccctttcacagccctgccaacatctgttattttttagctttttaataacagccattctgacgggtgtgagatggtatctcatcgtgctttttatttgcatttctctgatgattagtggtgttgagcattttttcatatgcttggaccacaaaggtcttagaaagccaggtggcttattaagtttctgtagtattctcttccttcccccgttactatttttttactggagagaggcaccaattcctgcacagcataactctggccagtaagtcaaacttagacctgggtgtcttccagggacaaggcagtgccctgagtgccagggtaagtacaaaacaagtccaaccccctaggggacaggtagtcagtccccttggaagcacattgtttgcaatggtcgggacaccccaagcaggacttaacattggtcaggcagtcgggttagcagggctcccagtgtgacctcccactgtgggcctcctgtcctagggttctcagtgtagaccgaataattcagtttagtcctcagtttcagaggctctgcctgaggcatcattttcaagcagttttgcatgtctgtgataccagttcattgacctctccagtatggacgacacctggagatgtcctttgtgggaagttcaggaactggggccacttgctgctgtctcagggttgtcggatgtgatcagaggcttagcagccaacctgaattcagagcactcacagctgcatgcaacacttccttcaggaagaggggagcgcttcggtcacagctctgaatcagacagttccatccaaggtcaagccagtccttcactgtgggcaactgagtgagccacatggaccagccagcacccctgatgtttttcgtagttcagggccttacccgggagtgtctaactctgcagtgtttcctgaattagagtcctgttcattgagcctagccctgctgtcaggtcagcatagtgaaggctgagttagcagtggacatagtgaggatgaattagcagtgggcagtgtcaggttttagcttacagtcaagtccacgccgttgggatctgagttcagaattccataaaacaccgaaggctttgcttctgcagcagtaaagctaggtattgccgggttggacagctgtgttccaagatcaagttgcaagcaagagtttcctaagcgcttttggtctcgtgaatcttagagtccaaattgacagttaaaaatatgcacatgtggtttgaaaaccatcaactcttgaggttgtcagaaataggttttcataagagcgcattaacaaactagaaactactacttcacattccaaaagtgtatctccacttagagattgcctctcttttcatttgtttcccttttccctgaacctccaataggaaaaatgatagtaaaaaatcagttgtggagacctaatcttaatacttagagtttaaattccaatccatacaccaggggcaaagagcaaagaagttgtgtctgtcacttaaaaaaacaaaacaaaaaactgattgagatgatccctgtagtgcttttaaagtgacaaatattttaccattttctctcatttttatcacacatgccgatgcggtagtattcctcgtctcttagagcttctggtagccccaagtgttcctttgcttgtggcaccataattcagtctctccctccatcttccacgtggccaccttccgtgtgtgtttctgtcttcatgtgacattttcctcttataaagacaccagtcagcggaggggggagggatagcatttggagatatacctaatgttaaataacgagttactgggtacagcacaccaacatggcacatgtatgcgtatgtaactaacctgcacattgtgcacatgtaccctaaaacttaaagtataataaaatggttaagatggtaaattgtatgctatatgtatttaccacagttaaaaaattggagaaaaaatccttggaatatagtagatgcaggttcaaatcctgccttcagcatttattagctgaactgatgctaataaagttacttaatctgaaaaaaatttaaaaaaaataaaaaataaagacactagtcatattggagtagggcccattggattagatgatgtcattttacttgattacatctgcaaggatcctatttacaaataaggttatagtcacaggtaccaggaattaggacacggacatatctttctgggggaccacgtcacaagaaaccgctggcagttcagcatttacagggatagcattatgctagcagggaagaccatggctggtcaggaggtaaaccaaggggaagcagggaacactccagccttttttttaaccagcaacaggttttaaaaaagcacggagtgtcccctgcctccccagggtttacctaaagttgtgctccagccttggtaattaactttcttttccctcccaatgcaacacaaacttttaccattttcctcacccaaagcttacctttcagaacatgggggccctttctcctacctggagaagaaaacaaaaaccaaacgctgctctttgttttcttttctttttttttttttgagctggagtctggctctgtcgcccaggctggagtgcagtggcgccatctctgctcactacaagctccgcctcccgggttcacgccattctcctgcctcagcctcccgagtagttgggactacaggcgcccaccaccacgcccggctaatttttttgtatttttagtagagtcggggtttcaccgtgttagccaggatggtctcaatctcctgacctcgtgatccacctgccttggcctcccaaagtgctgggattacaggcgtgagccaccgcacccagccacccaggattttttttagatgaagtcttactgtgtttctcaggctgtagtgcagtggcacgatcttggctcactgcaacctccacctcccgggttcaagctattctcgtgcctcagcctcccaaatagctgggattacaggcacgtgccaccacgcccggctaattttgtatttttagtagagatggggtttcaccatgttggccaggctggtctcaaactcctgacctcaagtgatccgcctgcctcagcctcccaaagtgctggggtgacaggtgggagccattgcatctggccagtacccaggatttttattgctggctgatcacataagcatcccctgcctggtatgtacacagattccatttccagaaggaaagcagctgttcagcattaacagtggtatttgcaccatgagtaatctgaattagggtgggggtgaaccttcccaaaacccaagttcccagacaccagctaagggcaacattgccagaaagccgttctaaggatagagtctaaggcccgcaatgttaacttctttcggcatatgggaactttattattaaaaaacactgcaaatacactgcactatgagcaattaaggctaacccagggagctcatattgtcccctgtgccagtaggagggtcctgtagatactctgcagctctgtgaataggactgttctagcatcagaattgctgcgtgacagtattttgtctgtctcctgctcatagacggaaaggagttgatctttctcagcaggtttgagggaaccgtgcatctcgggggttccatgcacctgtgcccaatatgcaatatggaaataatgagaaattgagagtgcagcctctagagtggtatgtggggaatcacttcctcctggaatttgagacacagaattttctaggaaggcactattttgtctatgtcttttataaccattgaaaattcgtagtcaaatggtttggacttcagttaactcctttgcaaagtgggactcttaactttatccttaaggttagcaataatactttttttttttttttttctgagactgagtcctgccctatcacccaggctggagtgcagtggcatgatcttgatgcattgcaacctctgcctcccgggttcaagcaattttcgtgcctcagcctcccaagtagctgggactacaggcgtgcaccaccatgcccggctaatttttttttttttttcagtagagatgaggtttcaccatgttggccaggctggttttgaactcctgacctcaaatgatctgcctgccgcggcctcccaaagtgctggggttacaggcatgagccaccacacttggcccaagaatactttctttcggctctggtgaaaagagctgttttggcattgtgtgcacctcgctctgtgtatacttagtgagtgtgcctgtgtgtacgagagagagccagcgtgtgagagagagagaacccagaattaattgttgggcttccgtcactgaggctcgaagtatagggaatgtgtggaggtctacgttctcgtgtctttttcctctttcctaaggtctaatttctcaataacttctagtttccaagttaaaatcaatacttctcaaaagaatgttttcattcagccagttggaccaggagttctttaagacgctatggctacctggcccttatgaaggaaatagaagggaatgttcccaatccttcagtgtttttatcccataaaacttcagttttgaccctgtgctttgtgtagtgccgaatgatggtgtgtgcagcaggggaggagctaaaacggtttgtgtgacaaggcactgatggtcttaaaatacaagtatttgtttcacttatatagcatttgtttgatatctccaatgtggtctgaatccttttgatagagaataatgtcttcagttggtcccagtaaaagtatagagagaaattcagtgtgttaatggtcctgtgaaatctatgaggaagtgagtgtagacaggaaggaagaggtgtgacaactgagtcacagggtagatgtcagggaatcacagaatcttgtttgaactacatacgaattgagtacaatgctcctgggctctcggtctcaaccatcctcccataaatatgttgaattgttttaggactcagtggtctttgaggatgtggctgtggacttcaccctggaggagtgggctttgctggattctgctcagagggacctctacagagatgtgatgctggagacctttcagaacctggcctcagtaggtaaggatgacatcattccttccttcacgtagttattgagagaacaagtatttcttacacatcagacctgttccaaggcttggaatgtggaaagggaataaattggtaaataagacagacatagtcacagctgtcatagagctagaatgtaatgtttttccatgagaatgagaatctgtatttcagctttttatttttgtagagaaagctcccttcatgtcgtcattgtggatatagctttgataggcctagtgaaatttgtttgtgcaagccagtgaaaatttgatttttttttttttttttgagatggagtctcactctgtcgcccaggctggagtgcagtggtgtgatctcgactcactgcaacctctgcctcccgagttcaagcaattatctgcctcaggcgcccaagtagctgggattacaggcgagcgccaccatccctggccaatttttgtatttttagtagagacggggtttcaccatgtcagccaggctgctcttgaactcctgacgttgtgatccacccgcctcagcctcccaaagtgctgggattacaggcatgagccaccgcgcctggccgtgaatttttttttttaataatttttctatgcttactaatactgtgttgattgagttgcttacctttttgaccattttgtgtttaatgaagtcctgagatagctaaactcctcagtgtcgttttccgctaacaagtgccttcttatatgatttgtttactttttggtttcagatgatgaaactcaatttaaggccagtgggtcagtttctcagcaggatatttatggagagaaaatacccaaggaatctaaaatagccacgttcaccagaaatgtttcctgggcctctgttttaggaaaaatttgggacagtcttagcatcgaagatcaaaccacaaaccaggggagaaatctcaggtgagttgcactcacaagagaacatagtatttcaggagagaatcttagtctgtcattaaactttaaaaaagcaagcaaacagaaaactcatccaagcctagctccaatttgtttaatccacagaatttttacaaaaaaatatttctttaaatgtgacatagacagtgagtgacattagaaacataattcagatggaaaccattatcaagaaaccctaggccaggtacggtggctcacacctgtaatcctggcactttggaaggctgaagtgggcagatcacttgaggacaggagttcgagaccagcctggccaacatggtgaaaccctgtctctactaaaaatacaaacattagcagggcatggtgccgcaggcctgtaatcccagctactcgggaggctgaggcagaattgcatgaacccaggaggcagaggttgcagtgagctaagactgcaccactgcactccagcctgggtaacagagtaagactctgtctcaaaaaaaaaaaaagaaagaaagagaaagaaaccctatacataagaaacactgttttaataatggcagtggtcaaaccatcttccagggcattcagtttatttcattttcagacagttcccatggggtgaaaaacctatgctttcactgaaaatggttaagatgcagtcctaatcctaataaatactaacaaatcattattaatcaaaccaataacatgcttctcatttttagtagaaatcatgggttggagagactctgtgaaagtaatgatcaatgtggagaagccctcagccagattccacatcttaatctgtacaagaaaattccacctggagtaaaacagtatgaatacaacacgtacggaaaagtcttcatgcatcgccgcacatccctcaagagtcccatcacagttcacactggacacaaaccatatcagtgccaggaatgtgggcaggcctacagttgtcgttcacacctaagaatgcatgtgagaacccacaatggagagagaccctatgtgtgtaaattatgtgggaaaacctttcctcgtacttcctccctcaatcggcatgtaaggattcacactgctgagaaaacctacgaatgtaagcaatgtgggaaagcctttattgacttctcaagtcttactagtcatctcagaagtcacaccggagagaagccatataagtgtaaggaatgtgggaaagctttcagttattcctcaacgtttcgaagacacacaataacacacactggcgagaagccatataaatgtaaggaatgtgcggaagcctttagttattcctcaacttttcgaagacatatgatttcacacactggagagaagccacataaatgtaaagaatgtggggaggccttcagttattcttcggcttttcgaagacacatgataacacacactggagagaaaccctacgaatgcaaacaatgtgggaaaaccttcatttatctccagtcctttcgaagacatgaaaggattcacactggagagaaaccctacgaatgcaaacagtgtgggaagaccttcatttatccccagtcctttcgaagacatgaaaggactcatggtggagagaaaccctatgaatgcaaccagtgcgggaaagcattcagtcacccctcctcctttcgaggacacatgagggtgcacactggagagaaaccctatgagtgcaagcaatgtgggaaaactttcaattggcccatatctttacgaaaacatatgagaacacatactagagagaaaccctatgaatgtaagcagtgtgggaaagccttcagcttgtctgcttgctttcgagaacatgtgagaatgcaccctgaagacaaatcctatgaatgcaagctatgtgggaaagctttctattgccacatatccttacaaaaacatatgagaagacataccgcagagaaactctataaatgcaagcagtgtgggaaagctttcagttggcctgaacttttgcaacaacatgtgagaacgcacactgtagagaagccctatgaatgtaaggaatgtgggaaggtcttcaaatggccatcatctttaccaatacatatgagactgcacactggagagaaaccttatcaatgtaagcattgtgggaaagcattcaattgttcctcatccttaaggcgacatgtgagaatacacactacagaaaaacagtataagtgtaatgtaggacatcctcctgcaaatgaattcatgtgcagtgcttcagaaaagtcacaccaggagagagatctgatcaaagttgtaaatatggtgttgcctttatgagttccttatcctgaaagtggacactcaaggagtgtgtctgtagttcatttgcaaataaacatttagttgaaaaataattctccaaatactctcagctatcctacatgaatttgaacaggtagtttcttacgattcagtaaataaaactttcatcttagagtgttttggactcatggatgatttgaagtgtatttttaatatgcaagtaggttcaagttttatttaatttcttaaattgtaactgacttagtgtgacaggtattggatattacgtatctattatattttccaccttttttactgggagtatttttattgtttggccagaggagccttattccattttttaagaagtagttggcagaattttgtaattatgcaaagttgtttaaggagtatagcctcaaatgaattgtaatttttaatgtttgcccattgctgtttgtctttgcttgtgattgtgaattggacagtaggctttgacttgtgatgtgacggagaaatccagagttgcagatagttcttctgcattgttgtcagtgtgggtagtgttaggaacttcatttgctggaatgcatttcctttatggttccatgtccaaatttaccaatagcaataacttgaatgaaatttagaatgaagaagaagtaagtcatcgctgagcttttggggtcacattaaatggagatggacagatgcataggggctttgtgaacatcaaccttcagcttattttccagattcttattcctgccaatcaagagtaccatcaaaagaaacacttaagtgcttgatttccactgtgtcagaggtgtagtcttcctcagacatctccattaacttgatattagggatattcctgtgtggtcagtcacctagagtctggatttttctcaaaaccctgcatgacctcttgaccactgattcagactgtcttgtttggcagtctctgagcttctgattctcccgttctgtagatcttaacatatttgcatggggtctaatttatatagtgaacaccttgttatcttaatacttccagtggctctgtgatcctgattccaccacgaaagccacagtgttgcagtcaaagaagaaaaacaacacatgggactttgtaccctattgcatttttaagtgtgcctgccgagtcctatgtgagaacaaataccttcctcatatattagatttagggagatttctgttactcagaactaaatgcagtttcttgatataggttaaattattaggtttgattatgtatcattaaaaataatgtggattttgtttcaaggaaaaccttctgtagatatttcttagaaatatcctgtttagctgggcacagtagctcatgcctgtaatccctgcactttgggaggcttgaggtcaggagtttgagaccagcctggttaacatggtgaaaccctgtctctactaaaaacacaaaaattagccaggcatggtggtgagtacctgtaaccccagctacttgggaggctgagacaggagaagtgcttgaacctaggaggcggaggttgcagtgagccaagatcacaccactgcactccagcctgggagacggggaaagactccatcacacaagcaagaaaagaaaaaaaaatcctatttactgtgctttcaaattagttgtttagagactatattaatttcccagggctgccataacaaagtacaaaaactgggtgacataggaaaacaaactttttgtttctcagttctggacccagaaatccagaaacaaggcattggcaggaccatgctttttctgaagatgctagggaaggatctgtttcagaactcacctagcttctggtagttccttagcttgtggcagcataactctaattttcacatggcattctccctgtgtgtgtgtctctccatgtgacaatatttttatacatacacaccactcattgggttaggccccactctacttcagtatgattttaccttaactaattacattggcaacagctctcttttcgcatactgaggcaccgcgaattaagatttcaacgtaaaaattttaggagacccaattcaacccataacactaagaaatgttattttttgtttaccgagagaattacagatttcaaatcaactttgtaattttgataatttaagcatgttacattttgaatcagtattaccaagtatatacaaatacaggtattttttcatataaatgttatttttaattgctgtatacttaacatttgccattaaaatgattttttttttttgagacagagtctcgctctgtcacccaggctggagtgcagtggcacgaccttagctcactgcaaccttcatctcccaggttcagttgattctcctgcctcagcctcccgagtagttgggattacaggcatgcaccaccacacccagctaatttttttatttttggtagagatggggtttcaccatgttggccaggctggtcttgaactcctgacctcaggtgatctgcccaccttggcctcccaaagtgttgggattacaggcatgagccaccacacccggcctaaaatgatttcttatttgtggttaataacaattaaaaagcggaaataatggttttgtcaaggccctctacccagaaaccaccaggatcacactggtagtcaaagaaaatttgctgtgttgagttgaagtttgaacacatgatcaagaaagggctgtggcttgtatcagagggtgtttaaaaggatttactatcagatttggccttgtgttctgtgattttggtgagcgttcaaggaagccaggctttggtctggattggatgttctcaggtcatgaatataattctctgggaactcccaaagttctcatctacaaagcagaagttaattggagctgaaaactaatcagtaaagccacagcagccagtcatatgggggagaagaggggaatgtttgatggtttttgtggtttagaggtgagttccggaaaaaaagaagacatgtttgacatcctcaaacgagaaaatttttcatgtgttttataggccaaggaggcagaagcttttgttttaatgagccagaaagccccaaaagcctatttaagttttctcaggtatcatttcaacctctgaacttccagaattaactagggaagaggaaaaacatgtaacaccttagagttttattaaagagcaaacaatatccagtaatctccattactttccatgttaacataagttttcataacgctctatagatgaatgtgatttggcagtcacttgtatttcttaacacccacttacccatcattccctcttagatgaaaaaagttaagcacggggacaacagagtcttgtatattcatgtagctcatgatgatggaatcaagtttgaaggcttaacctgtgcttaacctatattgggcattgtcaagacttaaatttagaacactggaaagcaagtataattaattttacaaatagggcatcaaattttacaaagactcctaaggctatatggtattccttttataagacatggaaaaggcaaagataagggaaacgaacaaatcgctggttagaagtaggggatttgagtacatatgggcttaagagtgttctgtcatgattgtagtggtgaaaacaagcatttgcaaaaactcataaggctactcttaaaatagcaaattttgttgtatgtatattttaaagttaaacaataaaaatgctttcagtttattaaagaactcaagaccaggtgcagtggctcatgcctataatcccagcactttgggaagctgaggcgggaggattgcttgtggccaggaggttgaggctgcagtgaactatgatcatgcactgcactctacactgggcgacagagcaagaccctgtctcaaaaaaaaaggaatacaaaacattcctgaaacttgacatgtaagttcgcaataagacttttccctagctgggcgcggtgactcatgcctgtaatctcaacattttgggagactgaggcaagaggatcacttgaagtcaggagctagacaccagtctgggcaacatagcgagacctcaactctaccaaaaaattaaaaagtgagccaggcggggtggtgcacgtctgtggtcccagctacttggcaggctgaagcaggaggatcacttgaggccttgaggagccatgatcgtgccactgcactccagcttgggtgacagagcaagactgtctcaaaaaataaaaataaaaaaacaagacttcccccaccatcttggaattctctggaggaaatgtagggctggttgacaaggacttgtgcctcgtcagaccctgtttgaaacccagtctgaagttttgaaacacccacaagggccatacctgactttatctcacgcacataacaggagagaagaaggaggtcttccagaatctgtctttgagtttacaccaggttcttcccatctgatctttgggaatgctgtggttctgaaacataaaacggggaccctacacttcttcccaggaatatcctgcctgggagcatcctgatcctgtcttcagacaaggggcatccgcatcttgttttctagggcctttcctgaggccacttccagctccaaagttctcatctcaagctcagctctgtgtcttcatgctgggaaacgtctttatggatccccaaactcctcttgctgttgggaacacgtggcagccctgcgttgtgaggtgagagaagaggcagtggcagaacccatgccatggagacacgcccatcagccacagcagctcctgctactgcataaatccataggcacaatcacacgcctcacggtgtcaacatctcccatgacatcacaaagatgcccagctgggacccacctacagtgatggggtgatggggtttcacctataagcgggcaaacaggcactcctcctcactgtccagtcacctgacgtgctttttctgcgcactcaggtcgtgacaccccaggaggtgcctatcgcgccccaagctcctcacgtgcctcctccccacagtccaggacgcgtcttactaacgcctcaccagagcgcatgcgccctcctcaggagcagcctcaaagcgcgcagcctcagcccattggcctgcgggaagtggagttcccgaacagaagcccctcagtctccggaagccccgcccggcagactgttcccaggatgcaacacgggctcgcgtctaaaagagctgtgctttgttggggctatctgggagtttccgccttccatgaagtgcgcaggcgcacttaggcgaggcggggcgactctaggaagtggagacatcaagagtggtactggaagtggcggaagctctcctcttgccctcttcagcttccggtgtggtgggtcccggatatcgcgtggctgtggcaggtagacagcccgtgctccagaggccttcatcttgtgatggcagatgtacttgagtagacacgacagacggggaaggaccctgatggtccgagggaccttccacagcaagtagaaggcactgctgtgaatatgatggcgtcagaggtgactgcaaaaaaggacagggcagctgggcgaggaagagataccagtgatgtcctaactgagctccctgggtctggtagtgaggagctcagtcttagaatatgagccgtgtcaggggctacagcatcatcactcttgtcctgtcgcagactcaggctccctgttctcaggttcttatgtagacagtgagggctcagggaggctcccaccaccaccaccaccagcaccaccactccatcaaaacggctgaaggaccttcctttagggttcgggggatctcctccttccacaagggatggatgtgaagacaactcattctttgatgttcagatggttgtggccctctgatgagatgtgtgcacaccttgccaaatgcatatgtctgttgagcctggacattaagtatttcttgatgttcttctgtgtaacaggtgatgtcctaggtgctgcagtgaacagaagagacaaaatatccttgttcccttgaagctaatgtcgtaggggcccaaaacaaagcaaacaaacaaaaaaaaggaatgcaagtcaagtacactttgtatggacagtggtaattcctaagaaggaaaacaaagatggacttaaggggtgcagagggcctggactatgtgtgtctgtgggatagtctgttactacctctgggactctcatctcttgagtgtgcttgggtgtgtccaaccgtttttcctagtgacaaagtctgggtaattctgtggggacatatattggtgtatctgggaggtcccatgtgtctcagtggtggtccctgttttcaggaaagagtgtctgtgaatgtccatgtgtctcactgcacagctgtgatttttctgtgtctctgtgttttccagtctttgtgtgatgaaatataaaggcctagcaggctcagagttattaatgaattgtacttaagcgttgagaggcatatatttattgcactattaaattcttccaaaatatagttaaaaaaaaaagcttcacagttttttagtaagtttgagtgaatttttttttcagggagtggggaacagagtctccatccattgcccaggctagagtgccgtggtgcagtctcagctcactgcaacctctgcctcctgggttcaagcgattctcgtgtctcagcctcccaagtagctgggattacaggtgtgtggcaccatgcccagctaattttttgtatttttagtagagatggggtttcactatgttggccaggtgggtctcaaactcctgatctcaagtgatcttccacccacctcagcctcccaaagtgctgggattacaggcgtgagccactgcgcccagcctcaagttgattttttaaagtttggcattcattgtttatttaaaaaacaacaattgggcagggaccagaggctcacacctttaattccagcactttgaaatgtcgaggcaggtggattccttgagctcaggagttcaagaccaggctgggcaacttggagataccccatctctgcaaaacatgaaaattagccagatatggtgaggctcgcttgtagtcgcagctaatcaggaggctgaagctggaggatagcttggacccaggaggtcgaggctgctataagccatgattgtgccactgcactccagcctggaaataagagcaagaccctatctcaaacaaaccctatctcaaacaaacaaataaaaacagccatattttattttaaaatatgtatcaaatgaattattaacaggaagcctattttctaaatggtaatcctttaaacactaatttttatgaaagtggccagtgctttttgtaaatcataaaacatgagtgttttcttcaatttgatttgtaaataaataatatcagagtttgcacttcccttggttcttaaatagaatattttcagaaatgggagcatataaaatgcatcaggagtgttgaccgaatttcctagtgattgatggaggccagccaatcctcagttgcacctcagagcctgccattaaatttaaaatagaagatgagaaactaaacttctcagttgacagtggtccgactttctctgccagcttctcagaggactcatctctactgtcacttttcattcttttcagaaaagctgtcagagtctttaggcaacctgtttcatcacccatgtctcaggccacaccaatatcctcagttctgattaacactcattatagctttccagtttctgaagcctcaccggtaaactgtctaggtagtgatttgctacataaatttaatgccatcatgcaatgtaatgggaaaggtgtttttattcccctgacctgagaccaaacttcaaactttctattttccctaattgagacttgtcctctgaagaggatgcaacctcaagtgatgttccaactacttctaatgactgatgttccagttagactctgggcctcatatgcaaaggaagttgcattgctgcagagcgcagagactgtgcacgttgcctggaaaaggaataagccttttcttttttttttttttttttttttttttttttgagatggagtctcgctctgtcgcccaggctggagtgcagtggcgcgatctcggctcactgcaagctccaccttctgggttcacgccattctcctgcctcagcctcctgaatagctgggactacaggcgcccaccaccatgcctggctaattttttgtatttttagtagagatggggtttcaccgtgttagccaggatggtctcgatctcctgacctcttgatccgcccgccttggcctcccaaagtgctgggattacaggtgggagccaccgcgtccagcctaagccttttcaatcaatagctcaatgccctctcgtgtcaatatgcagaacaaggaactgaatctatactagactttattacagcacagtgtccattatctttactttctcccactataataccccagtcttgcccgtaaagatgagaagggaagtttgactttgatgagcaccaaagttaccaattttacaaaatctaatagccataattcttgtagttcctcaccaccctacagttcccactatttttaccctagttcctgtgtctgcagcctggtttgcatgaatggacctctgctcagctgtcttttccattcctttgcgtcctgattcacagttcctctttgcacttctgtttagaggaggacagtgggtatggcctgcacacctcaggaatattgctggtaccccatccatattttcccaagtccttaaggcctactcagactttgtaacatttatccaaggctctactcgtgttcagtatactgatgatgcctttgtagccaaactaagcaaggtggtcttatggatttcctcattctcctagagacactagctgaattaagccataaagtctcccaatctaaatttcagtgggtgtagatagctattacttaggatgcgaggtatctcagggcacccaaagctcacccagaacaccttgaatcaattttatccatcgctctccgcaaaataaaagcaggtatgggccgggtgaagtggctcacgcctgtaatcccagcactttgggaggccaaggtgggtggatcatgaggtcaagagatcgagactatcctggctaacacagggagaccctgtctctactaaaaatgcaaaaaaaagctgggcgtggtggctcacgcctgtagtcccagctactcaggaggctgaggcaggagaattgcttgaacccaggaggcagaggttgcagtgagccgagatcgtggcactgcactccagcctgggcaacagagcaagactctgtctaaaaaaacaaacaaaacaacaacaacaacaaaaagatatgtataattctaggagcagctggctctcttcactgagaattcctacttttgctcctttgctaaacctctgtatgccgtcctctcacgtgctgcctcagagcctagtatctgcccctcagagatattgaccttctttgtttttttttttgttttgttgttgttttcagacggagtctctcaggctggagtgcagtgtcgcgatctcggctcactgtaagctccgcctcctgggttcacatcattcttctgcctcagcctcccaagtagctgggactacaggtgcccgccaccatgcccggctaattttttgtatttttagtagagacagggtttcactgcgttagccaggatgctctcgatctcctgaccttgtgatccacccgcctcagcctcccaaagtgctgggattataggcgtgagccactgcaccttgcctctttatgcactcttaacctgtctcttctcattccttcgtcaccactggactttgggtaccctacgggtgatgttaaggctggtccccaacaattgttatttgtggaaactttccagtacccacgtatagccagcagcccctttaagggaacataactctccctggctggccaacaaatagcccggagccaagcagtcatcagctgtcgagtctgccagggagcgttgtccttcacggaaagcatctaaagcattagctctctgctgcgtgtggttagagtgtgctgaacgttttccgatggcttcatggtttgagttgacaggatgacatcatgtgtgcctaaggcagtgcccgtggtggcccaaaaagtatgtgcaatgagcagaaaattagcacacttgtctcaagaggaggtttgggagtgggtgtgagatggagcagggactccctcttcacggcctgtggatctcccaggcatagaaataaagaacaatcttgcttttcttcaaggtaaatttcagtcacctagttagccccaagaagtaaatatgcaacttgataagcaagaaggtaacggtagcctaaaacaatagccaaggaagctagaagcatcggatgtgtagttctcctgtagaaactaaagatggtggccgggcgcggcggctcacgcctgtaatcccagcgctttgggaggctgaggcgggcggatcacgaggtcaggagatcgagaccatcctggctaacacggtgaaaccctgtctctattaaaaacacacaaaaaattagccgggcatggtggcaggcgcctgtagtcccagctattcgggaggctaaggcaggagaatggcgtgaaccctggaggcagaacttgcagtgagcccagatcgtgccactgcactccagcctgggcaacagagcgtgactctgtctcaaaaaaaaaaaaaaaaaaaaaaagaaagaaaaagaaaaagaaagaaagaagcatgtgttatgggttgtactctaaggtgccagtaagtctgatgatcaggacaaagtagggggccctaaaggctggggtcgagcctaagtaaagctgcacacagtggagaagacccgtttagaagaccatgtgtggtctgtaatgtcagcaaggtttgtttgagccatcagttctaggaggcctctagcccgagagtataagagagcagaaagttgctttgaacgccttgttcaagagcccagcgttggccaggcatggtggctcatgcctgtaatcccagcactttgggaggctgagacaggtggatcacgaggtcaagagaccaagaccatcctgaccaacatggtgaaaccctgtctctactaaaaatacaaaaattagctgggcgtagtggcgggcacctgtagtcccagctactggggatgctgaggcaggagaaccgcttgaacccgggaggtaggggttgcagtgagctgagattgcaccactacactccagcctggtgactaagcgagactccatctcaaaaaattaaaataaaataaataaataaataaataaataaaagagcccagtgttgtgttggaacaggaattaaaacagattaaagaatgtgtaagcagaaactcagttgtatgtaagaaaacccaattccccctgagaacaagaaagagctggagtcttttaaaaattaactgcctgtttttctgtggctagtgagccttatctctcctcccttcccaggcattgtgaaggccctgtttccctagttgtgcagctgcaagttcactagacagataaactcaagttgcaaaacatgttttgccttgaaaagtaagaaatgatgtaatgcacgtctcaattaattgaataactctctttgtctctcgcttctgtaatatgcttccccctgcacagatctcccccggccccacaaaatgcttcaaaggtaacttaactctttgttcagggctcagtcctttgggtgttaatcggactgggctggtgcagctaaataataaatatcctcctgaaccccatcggtctctctgattccttatcaatctcgctacagtgtcgtttgagaaaagaactgagcaccttgatcactgtcagtagcatctgtaaccccaagggaagggcgggtcttggtgaaaccctgtattgtggctcagcaggagaacgtctggtgggattggtaaggaatatttgcatttaagtggcttccgtgatcacagtatacggaatagcctctgcaaaggtgggcggggaccctataaaatctatttgctctcagccctaccaacaggcttccagggattatgcctccttgattatatgtcatttgcctgtagactattcatctgcctgcacattgagcgctcagctgtggtgtttgagttttcataggtacacagatattcgtgaccttgatttttacttgagaaactgtgaggcaaaatatccccagagtgctttaacctcaaaatattgacctaggatacagttgttgccacagttttttttaagtgtgttttcggtttttttgttttgttttgttttctatgtttttgttgttgttgttgtttttgagacggagtttccctcttgttgcctaggctgagtgcagtggggcaatctcagctcactgcaacctccgccttccaggttcaagcgattcttcccccttagcctccgagtagctgggattacaggcacccaccaccacacccggctaattttttgtatttttagtaaagacagggtttcatcatgttggccacactggtctcaaactcctgacctcaggtgatccacccaccttggcctcccaaagtgctgtgattacaggcatgagccaccgcgcccggctggctagaccattgctaatggctcaagagttcagttctagcaattgtgctgaccctagttagggaatggtaaagctttcgttggtcactcacttgaccccatgggcctccccaggtgtctactggtcaggagagagaggggacctcctccagtgtcatggaatctgacaacagactgaggacagaagaagctgcttttttctacggtggataccccaagggcccaggtttccctctaagtcagtaccactttcatttcaggaaggagaccaccgtggatgggggctgctgcctgcaggacccgagacctgaaaactgaccaatcaggcagctggggtggggcctagagaactgaccaatcaggggagttgaggtggagcatccggatgagaactgtcaatcaggggggttggggcagagcctggagacctgtcaaatcaaaggagctgaggcagggcgtggaaacatgaccaattaggaaagctggggtggggcctgaagaactgcccaatcaggggagctcaggggatagcaagctgaccaaccagaagaggaggggcagagtctaaagaactgtccaatcaggggagttgggatgtgactggtgaactctccaatcagagatgagcagagaagagaaccatccaatcacagccccaggggcggggcgttgctgtcctccctgcagagcacacccggcctgccctgagtgaccacaggtgtccccgtcgtgctcacctgcaccggctgcgaggagcagggagctcctcaaagagctcaggaacggacaggacatggtgagtgcagggcaggagccgagccggagccggagccctgggaggggagggttggaagcggccagaacacgctgaaactcccgggggagccgcccggaacccccatgcagcctctgtccctgtgtcacccccgggtcctgcggggagtttcctcccctgccccagtcttcattccctggaaagtcgtagttgtcaggacgctgggatggaggggaaaaaaaggcagaaatgactcctgccctgtggggtctcgcgaagttaattggaagaaaaactaacccaaagtacaaaaaacaaaacaaaaaaaaaaaaaacctcaccccagcgaggcggtgcaacagccccaaagcagaatgcgctttggatgcagactttgggcccaggcccacgtccctgggaggggcgaggggtggacaggtggtgcgggcgctccacgtggcggcacgggctggcctgaccccaaaggcccgcaggccggactccagcccagccgcccctgcctgggcctctctccttctaaagattgatttggttacttgagcctcagattttttcagtcaatggaacatacagtaaataatagagtttgaaagataaaatatttccaaggaggtgaatttcagaaaaaaataaagttctcgtcttacattccatttgttaaaaattctagcgtgccttttttttttctttttattttctgttccttttttgcccgtgtggttaagtttctcacatctgttgttttattttcggtgatgacaaatgggattccagggcttagcccttgacggggctcccgggaaaaagaatcgcagagaaagagagaaaatctctcttttattatgacacgccccgaaatgaatacattcctacaagaaaaaaatgtttggtatataatttggtgaattacaaaaactcgctaaaatatcagttattctccttttccaggatggagaatttgtgatagatgataattctgttcttttattttttgtttttattttttgaaacggagtcttgctctgtcacccaggctggagtgcagtggcgcgatctcggctcactgcaacctccgcctcctgagttcaagcgattgattctcctgcctcagcctccccagcagctgggactacaggtgtgtgccaccacgtccagctaatttttgtatttttagtggagacagggttttaccatgttggccaagctggtctccaactcctgacctcaggtgatccacccgccttggcctcccagaatgcttggattacaggcagcatgtgccaccatgactagctaatttttttttttttttcagatggagcctcgctctgtcacccaggctggagtgcaatggcgcgatctctgcttactgcaacctccgcctcctgggttcaagcgattctcctacctcagcctcccgaatagctgggattacaggcacgtgtggccacacccagctaatttttgtatttttagtagagacggggttccaccatgttggccaggctggtctcgaactcctgacctcagctgatccacccacctcagcctcccaaagtgctgggattacaggcgtgagccaccacacctggcccctttatcactcttttatattcactcatagggatatattgttagtgttcattaattccactgcttgctagtgactattcgggtattttcaaattttttccattgtgaccagtgcccctaaagacattattacatgtgtgtccacttgaatgccttattctcagctgcactgcagtatatcctcatcctctccccaagagcctggtccacatattaccgcctacatctcagttgctggtaactccattattccagctttcctgtgtgaaataattagtcttccttgattcttcctgctctgtcttgccccaccttgagcccatgaggaaattttatatctcctctttttttaaattttttattttttgagacggagtcttgctctgtcaccgacgctggagtgcagtggcgcgatctcagctcactgcaagctccgcctcccgggttcatgccattctcctgcctcagcctcctgggtagctgggactacaggtgccctccaccacgcctggctaatttttttgtactttagtggagacggggtttcaccttgtcagccaggatggtctcaatctcctgacctcatgatccgcccacctcggcctcccaaagtgctgggattaacaggcgtgagccaccgcgcccggcctagatctcctcttatgctgctcttgcacaggactgcactgtgacacccaagctgacacgcctacttctcatctagtgcggctttcgcctcctaactggtgtcccggtgtctgtatgtgtcccctatgatctagtctcagctgtcagatgagatcactgctctgtgcaaaggcctggaggagtcactcagagccaaagtccttactgtggctgatgagttccccacaaagtgatgtgcctcacttcctgtcactcgaccccccttggctgtcactccccattcccctctgtccagtcacacaggctctggctgtgcctgaaagagccaagacccgctccttccatagggcctaacctctggctgtttctcccacccagaacaattttctcctttctatattttttcattgtatactacattcgccatgattaatttaaattggatcacatctgaaagcttctcttgtcgctaatttcagggaacagatgacattttactattttgggttgggcccccatgcctgtaatcccagcactttgggaggccgaggcaggtggatcagttgaggtcaggagttcgagaccagcctgaccaacatggtaaaaccctgagtctactaaaaaataataataataataaaaattagccaggcatggcggcacacacctgtaatcccagttagttgggaagcaggaggatggcttgagcccaggagttcaaggctgcggcgagttctcattgcgccattgcactccagcctgcacagcagagtgagaccttgtctctaaaaaattttctggccaggcacgatggctcacgcctgtaatcccagcactttgggaggccgaggcaggcagatcacttgaggtcaggagtttgagaccagcctggctaacatggtgaaacctcatctctactaaaaatacaaaaatcagttggacgtggtggcacacgcctgtaatcccagctactcgggaggctgaggcaggagaatcgcttgaactctgaaggtggagtttgcagtgagccgagatcatgccattgcactccagcctgggcgacagagtgagactccatctcaaaaaaaaaaaggccgggcgcgatggctcacacctgtaatcccagcactttgggaggccgaggcaggtggatcacaaggtcaggagatcgagactatcctggctaacacggtgaaaccctgtctctactaaaaatacaaaaaattagccaggcatggtgatgtgtgcctgtaatcccagctactcgggaggctgaggcgggaggatcacttgaaccttggaggtggaggttgcagtgagccgagatcgcaccattgcactccagcctaggtgacagagcgagactctatctcaaaaaaaaaaaaaaattctaaagactatgacacaggataaagaatatatgaaaacacagaggttgcagtgagctgagatcacgccactgcactccagcctgggcgacagagtgagatgccgtctcaagaaaaaaaaaagtatatgacatacacatatatacagttaaatgttattcagtcataataaagaaggaaatcctgccattggtgacagcactgatgaacctggggcacattatgctatgtgagacaaaccaggcatagaaagatgaataccggatgatcttacttacatgaagaatcaaaaagaaccagattcctagaggaagagagtagaagagtgattgcctgcggctgagggacaggggaagtggggagagatgttggtcaaagtgaaccaactttccattgtaaggtgaataaattctctacatccagtgtccaaatggtgactgtatttaaggatactgtaatgtatacttgaaatacactgggcctggtgcggtggttcacgcctgtaatcccagcactttgggaggctgaggtgggtggatcacgaggccaggggttcgagaccagcctgaccaacatggtgaaaccccatctctactaaaaatacaaaaattagttgggcatgtatagggaccagccccacagggtcggtgggtttctccccatgtgcagagacaagagagcgtagaaataaagacacaagacaaagagataaaagacagctgggcccgggggaccacaaccaccaagtcgcagagaccggtagtggccccgaatgccaggctgcactgatatttattggatacaagacaaacgggcaggataaggagtgtgagccatctccaatgataggtaaggatgcatgggtcacatgtccactggacagggggcccttccctgcgtggcagccgaggcagagagagagaggagacagagagtgagacagcttatgccattatttctgcttatcagagacttttagtactttcactaatttgctactgctatctagaaggcagagccaggtgtacaggatggaacatgaaagcggactaggagcgtgaccactgaagcacagtatcacagggaggcggttaggcctcgggataactgcgggcgggcctgactgatgtcaggccctccacaagaggtggaggagtagagtcttctctaaactcccccgggggaagggagactcccctttcctggtctgctaagtagcgggtgtttttccttgacacttacgctaccgctagaccacggttcacttggcaacaggcgtcttcccagacgctggcgttaccgctagaccaaggagccctctggtggccctgtctgggcataacagaaggctcgcactcttgtcttctggtcactcctcactatgtcccctcagctcctatctctgtatggcctggtttttcctaggttatgattatagagcgaggattattataatattggaataaagagtaagtactactaactgatgattaattatattcatatataatcatatctaagatctatatctggtataactattcttacttgatattttattatactggaacagctcatgtcctcggtctcttgcctcggcacctgggtggcttgctgcccacaggtgtggtggcgggcacctgtaatcccagctactcaggaggctgaggcaggagaattgcttgaacccgggaggtggaggttgcaatgagccgggatcgcgccactgcactccagtctgggtgacagagcgagactccatctcaaaaaaaaaaaaaaaaaagaaatatactaaaaggccgggtgtggtggctcacgcctgtaatcccagcattttgggaggccaagacagctggattacttgaggtcaggagttcaagtgcagcctggccaacatggtgaaaccccatctctactaaaaatataaaaattatccaggcatgttggtgtgcatctgtaatcccagctacttgggagactgaggcaggacaatcgcttgaacccaggaggcgcagcttgcagtgagccgagatcgccctactgcactccagcctggggcgacagagcaagactccgtctcaaaaaaaaaaaaaatgaaatgtactaagagtgtaaatcttacttgttcttaccatcagattttttaaaaaggtaactggtaacagatgtgttaattaacttcatggcagtcatttcccagtgtatatgtgtatcaaatcatcacctacaccttaaatgtatacaacttttatttgtcaaagacaaaaaaacctacgacacaggaagtgattacagacagaggggaagaggtctgaggactgagtcttaaatagatattggcagactgcaggatcttgtgtgagtgtcctatgaactgagttcagttccgcagtgctgtgagttttaccccatcctcatgtacacatatgtggtttgttttaggacacagtggtctttgaagacgtggttgtggatttcacgctggaggagtgggccttgctgaatcctgctcagagaaaactctacagagatgtcatgctggagaccttcaagcacctggcctcagtaggtgaggatagcattatttctgcacttagttattagataataaatgttttgtctggttgcagtggttcatgcctgtattcccagtgctttaggaggctaaggcaggaggatcacttgaggctaggagttgacaaccagcctgggcaacatagtgagaccttgtctctacaaaaaaaaaatcaaaaattagcccggtgtggtagcatgctcctgtagtcctagctacttgagaggctgaggcaggagaatcgcttgagaccaggagttcaaggctacagtgacccatgatcacaccactgtactccagccagggtgacaacttgagaccctgtctcaaataaaaaagaaaaaagagccaggcacggtggctcacgcctgtcatctcagcactttgggaggccaaggcgggtggattgcctgagctcaggagttcgagaccagcctgggcaacacggtgaaatgccatctctactaaaatacaaaaaattagctgggcatggtggtgcgtgcctgtaatcccagctactcgggaggctgaggcaggagaattgcttgaacccgggaggcagaggttgcagtgagccaagatcatgccactgcactctagcctgggccatagagtgagactccgtctcaaaaaataaataaataaataaataaatatttcttgctcattaagcctattctaagatttagaatgcagaaggggaatacattggttaataagacagttataatcattgatgtcctggacctaaaattcagtagcttctctgtgataataaaaatctacctatcaatctgtacttttctttctgccttgttgaaaagacttaggatcagccaggcgcggtggctcatgcctgtaataccagcactttgggaggccgaggcgggcggatcacgaggtcaggagtttgataccatcctggctaacatagtgaaaccctgtctctactaaaaatacaaaaaattagccaggtgtggcggagggcacctttagtcccagctacttgggaggctgaggcagcagaatcccttgaactcgggaggcagtggctgcagtgagtcgagattgtatcactgcactccagcctgggtgacagagtaagactctgtctcaaaaaaaaaaaaaaaaaagaaagaaagaaagaaagaaaaagaaaagacttagggtccttttgtgttaccagcgcaggtatatactggcggcacagagaggttaattgtttgaaaccttgtgatgatttttctgtgtatttaaaattgtctaccattttgactgcttgtacttttttttttttttttttgcttctcattagttgaaatccttgagagggacagcatcacagggactctgtgtccagtggtcttagcaggaagattgcttcagaatttggcatgaatcatgccactgtttctgtgggcctgaatgcccttccctcagatgattctggtttggtttggtttgccaccaggagttactgtgttgttgtttgctttgtatacataagcatgtctcttacccaaatagaattcagtttcatcttgaacataaacaccttcaattattactattattattattttgagacagaatcctgctctgtcgcccaggctggagtgcagtggcacgatctcggctcactgcaagctctgtgtctcaggttcacgccattctcctgcctcagcctcccgagtagctgggactacaggcgcccgccaccacgcccggctaattttttgtatttttagtagagacagggtttcaccatgttagccaggatggtctccatcccctgacctcgtgatccgcccgcctcggcctcccaaagtgccaggattacaggcgtgagccactgcgcccggccaaacaccttcaattttaagaagaactgtgtgctccctttggttctggagaccctgcttataggcagccaaaatggccttggaccaccaccttccagacacattttcttttgggagtcgtgttccctgcaggcctccacaggctccaagatggcagaaggagagctcttgtacttcttcataatgaagtcaggccgggcacagtggctcacacctgtaatcccagcactttgggaggccaaggcaggcgaatcacaaggtcaggagatcaagaccagcctggccaatatggtgaaaccccgtctctactaaaaataaaaaaaattagctgggcatggtggcacgcacctgtaatcccagctacttgggaggctgagacaggagaatcgcttgaacccgggaggcagagtttgcagtgagccgagatcgcgccgctgcactccagcctgggcgacagagtgagactccgtctcaaaaataaataaataaatagataaataaaataaaatcacataatgaagtcatgaaacaattaaacacctgaattacttctttctttgcagatgccttcctcatcatattggttcacttttttgtttcagataatgaggctcagcttaaagccagtgggtctatttctcagcaggatacttctggagaaaaattatccctcaaacagaaaatagaaaagttcacaagaaagaatatatgggcctcccttttaggaaaaaattgggaagaacatagcgttaaagacaagcacaacaccaaggagagacatttgaggtgagttgtacttagaagaaaaaggcagtatcgccaggcacggtggctcatgcctgtaatcccagcacttcgggaggccaagggaggcggatcacctggggtgaggagtttgtgaccagcctgacccatatggtgaaaccttgtctctactaaaaatacaaaaatgggcgcggtggctcacacctgtaatcccagcactttgggaggccgagggaggcggatcacctggggtgaggagtttgtgaccagcctgaccgacatggtgaaaccctgtctctactaaaaatacaaaaataggcgtggtggcatgtggctgtaatcctagctgctcaggaggctgagacaggagaattgcttgaacccaggaggcggaggttgcagcaagccaagatcgtgccactgcactccagcctgggctgggcaacagagtgagactctatctcaaaaaaaaaaaatgataattctgttagaaacaattatcagagagccccacatattactattgtttttgtaatggactgtggttgaactatctaccagagtatttcgtttattctagtttgaaataatttcaacagtacaggaaacttacccttgtatagaaaatggcaaaaatgttatcctaatattcattaatatatattaagaaataattggccggtgcagtggcttatgcctgtaatcccagcactttgagaggccaaggtaggtgggtcacctgtggtgaggagtttgtgaccagcctgaccaatatggtgaaaccctgtctctaccaaaaatacaaaaattagctgggcgtggtgccatgtgactgtaatcccagctgctcaggaggctgagacagaattgtttgaacctgggaggcagaggttgcagtgagccaagatcatgccactgcactccagcctggggaacaagagcaaaactccatctcaaggaaaaaaaaaaagaaattattaaggcataaaccattaataatgtgctacccatttttagcagaaatccaagggtggagagaccatgtaaaagcagtaaaggtaataaacgtggaagaaccttcagaaagactcgaaattgtaatcgtcatctgcgcaagaattgttgtactagtgtaagacggtacgaatgcagtcagtgtggaaaactcttcacccattcctcatccctgataaggcacaaaagagctcactctggacaaaaattatataaatgtaaggaatgtgggaaagccttcagtcgcccttcctacctacagacgcatgagaaaactcacagtggagagaaaccctatgcctgtcaatcttgcgggaagacatttcttcgttcccactctctcactgaacatgtaaggactcacactggagagaaaccctacgaatgtgggcagtgtgggaaaggcttcagttgtcccaaatcctttcgcgcacatgtgatgatgcacgccggagggagaccgtatgagtgcaagcactgtgggaaagccttcaggtgtcagaaatcctttcgagtccatatgatcatgcacgccggagggagaccgtatgagtgcaagcagtgtgggaaagcctactgctgggcaacatcctttcaacgacacgtgagaattcacaacggggagaaaccctataagtgtggaaaatgcgggaaagcattcggttggccctcatccttacacaaacacgcgagaacgcatgctaaaaagaaacctgtgagtgggggcagcgtgggaaagtcttccgcgaggcctcgcccctccacagatgtcaaatcacaaactagagagaaagtctataaatgtgaaacgtgtgggaaaacgtatggttggtcctcatctttacacaaacatgagagaaagcacactggggagaaacctgtaaatgcagccagtgtgggaaaaccttcaggcgggctttgctcttccaaaaatgtaagaacgcagattggacagaagcccagtaaatgcgaaaaatgtgggaaagctttcagttgtcccaaagcctttcaaggtcatgtgagaagtcacacaggaaagaaatcctgtacatctaagtaatgggggaaaacctgtgcaaattaattcacatacatggttcagaaaattcacagcaggagggccgggcgcagtggctcacgcctgtaatcccagcactttgggaggccgaggcaggcggatcacgaggtcaggagatcaagaccatcctggctatggtgaaaccccgtctctactaaaaaaaaaaaaaatacaaaaaattagccgggcgtggtggcgggcacctgtagtcccagctgctcaggaggctgaggcaggagaacggcgtgaacccgggaggcggagcttgcagtgagccgagatggcaccactgcactccagcctgggtgacagagcgagactccatctccaaaaaaagaaaattcatggcaggagaagaatctcatgacgtttataaatatggtattgcctttatcaggaccacatcctaaaagtgggcctctagcaaatgaatttgcagttctcttgcaggtaaagttgaggggagaatcctgtaagtcctctctcacctatagtactgaaattttgatacataatggttttttcttataaattactaatgtttctcttttcatttagaagtgtattgcacccatgggtgatctgatgtattttaatatgcattaactttaatttttatatattttttttgttactccgtgtgaggccattagaccaatgaaatatgggtgtttgttgacattttctgactggccctgtgtgttccaagctggatattactaccatgttacttttattccacctttccattttacagggaaaaactatttttaatgttaatactttctacttatacaggcaagtaattcagtggctttatgctattggtcagagaatccttcttcattttgcttgtggactaataggtagttggtagaaatacgtatgcatgcaaattcttggaggagtgtagtctcgtgggaactatttttttcatctgttgctgtttgctctttgacctggcttctgggttggaattggaaaataggtttttttgggttttttttctttttcttttttgagacagagtcctgttatgttgcccaagctggagtgcaacggcacgatctcggctcactgcaacttccgcctcccggtttcaagcgattctcctgcctcagcctcccaagtagctgggactataggcatgcaccaccatgtccagctaatttttgtatttttagtagagacggggtttcaccatgttggccagggtggtctcaaactcctgaaatctgcccgccttggcctcccaaagtgctgggattacaggtgtgagccactatgcctggccatattatcattatcttaatacctcattgtctcagtatttcttgtgcttctgtgttcctgcttccatgacagatacaatggtacaaccataaaaacacaggggattgcggctgggcgcggtgactcacgcctgtaatcccagcactttgggaggctgaggtgggcggatcacgaggtcaggaaatcgagaccatcctggctatcatggtgaaaccccgtctctactaaaaatacaaaaaattagccaggtgtggtggcgggcgcctgtagtcccagctactcgggaggctgaggcaggaggatggcgtgaacctgggaggcgaagcttgcagtgagctggaatcgtgccactgtactccagcctgggcgaaagagcgagactctgtctcaaaaataaataaataaagaataattttttaaaaaagcacaggggattgtttccctactgcatctactgtgacctagtattcttcgtgagataaatcttacctttcatgagaaaatgaaagacaatactggcttatcaggtaaactctggaaatttcctgtcacatagagctgaatacaatctctcagtatgtgttcagttattatgtttgattatgtattattaaaacaaaagtttctgtttctgagaaatatctatttactgtgtttgtgtttttaaagaagttggattctatacaaatggataaaatgtttcttagaaatagcctatttaactgagtttttcaaataagttgtatactaacaaatgtcaatctctgttttttatttactgggagaatgtattaaaatattgaaaattgccaaatcaacatggtgactttaaaaatgatacttctgggccaggcacagtggctcacgcctgtaatcccagcactttggggaggccaaggcgggcagatcatgaggtcaagagatcgagaccatcctggctaacacggtgaaaccccatctctactaaaaatacaaaatattagtggggtgtgctggtaggtgcctgtagtcccagctactcgggaggctgaggaaggagaatggcttgaacctgggaggcggagcttgccaagattgcgacactgcactccagcctgggtgacagagcgagactccgtctcaaaaaaaagaattatacttctgaattaatattaccagatgcattcagatttagacattttctttctagtacatttgtttcctatactgttataattttgtctaagaaattcttttttttttttttgagacagattctcgctctgttacccaggctggagtgcagtgccgtgatcttggctcactgcaacccccccgccaaggttcaagtgattctcctacctcagcctcctgaagagctgggattacaggcacccgccaccacacccggctaatttttgtatttttagtagagacggggtttcactatgctggccaggctggtctcgatctcctgaccttgtgatctgcccacctcggcctcccaaagtgctggggttacaggcgtgagccaccgcgcccagcctaataaattcttgtttattcataatgacaaaaacttacgtaacggttttataaatttaagtattaaataagtctagcaaaagacataaaaagataactaataaaacaagtttaaactttattggagcccagtagcaatggctcacgcctgtaatcccaggacccaccgaggcgggtggatcacctgatgtgaggagttcgagaccacgctggccaacatggtgaacatggtgaaaccttgtctctactaaaaatacaaaaaattggccaggcgtggtggcaggcgcctgtaatcccagctacttgggaggctgaggcaggagaatcgcttgaacccgggaggcagaggttgcagtgagccaagattgcgccactgcactccagcctgggcgacaagagtaagactccatctcaaaaaaaaaaaaattttttttttggataatatcaaggcagaataaagtatagtatcaaacttgacaaggtagataatagggaatgcagaataaaggatcgggcttcagtaagtgacaatctcatcatgaattcatttatagttccaccatgtaatatgtcttaaatactatttctttttttttaatactatttcaagaactgctcatgagttaggaaatagtgagcagtaatacagaaataacggcaggaccaggggcagtggctcacacttgtaattccaaagcttcgggaggctgaggcaggaggatcacttgagcacaggagttcaaggccagtctgggcacatagtgagacacagtctctataaaaagaaatttttaaaagtatctaggcatggtgatgtgcacttgtagagccagctactcaggaggctgagggtggaggatggcttgagaccaagaggtccaggctgcaatgagttatcttgccactgtactccagccagggtgacagaatgagaccgtgtgtcaaattaaaaagaaaaaaagaaacaataattatttccctggccgggcgcggtggctcacgcctgtaatcccagcactttgggaggctgaggcgggtggatcacgaggtcaggagatcaagaccatcctggctaacccggtgaaaccctgtctctagtaaaaaatacaaaaaattagctgggcgtggtggcaggtgcctgtagtcccagctactcgggaggctgaggcaggagaatggcgtgaacccaggaggcggaacttgcagtgagcagagatcgaaccactacactccagcctgggcgactgagtgggactctgtctcaaaaaaaaaaagagacaaaaggtatatttatggttcagcctcatttctgcaaatattaaaaattttagggcatgatgtatacattttatatatatatatatatagtgtgtgtgtgtgtgtgtgtgtgtgtgtgtgtgtgaatgtgtgtgacggagttttgctctgttgccaggctggagtgcagtggtgcgatctcagctcactgcaacctccacctcccaggttcaagcgattctcctgcctcaccctcccaagtggctgggaatacaggcgtgccccgccacgcccagctaattttttgtatttttagtacaggtggggtttcaccttgttggccaggatggtctcgatctcttcacctcgtgatctgcccgccttggcctcccgcagagctgggattacaggcgtgagccaccgcaccaggcccatgtcatatgtttttatgagtttggacattggcatctgggaccaggtacttcatctggatttgaaccacaatgtgggtgtttgtttttaatacctttgtgaaataattttaaattgccttatatatttggcattgtcactttgctgcccctacacactgatggaaaaattgtgttctgcagaaaactagagttcctcacagggtgaggaagagttatggtcatctgcacagttgtagcccgttgcgagtgttttcccatgtgcacagtgatatctaggcaagtgtgccatgatttcctggtgaggataaaatctatggacggtgagagaactagtcaaggaataactgaagtgagctgcagacaggattatcattttgagtaacatcccaatgtatttgtcatcctttaattaatttttatttttttaattaaaaaataatttttaagtgtaaacctttaatgatccacaaagcccaaaatgtccatttgattttcataggtatcgtttccatatgcttagacttccagcagctattagaagagaaaaatatgtaacagctttgtgtttaattaaaggcaaatgaaatccagtctgtgtccattttcaatgttaatagtcttgatagcgggccgggcgcagtggctcacgcctgtaatcccagcactttgggaggctgaggtgggcagatcaccggaggtcgggagttcgagaccagcctgaccaacatggagaaacgctgtctctactaaaaatacaaaaattagctgggcatggtggtgcgtgcctgtaatcccagctacttgggaggttgaggcaggagaattgcttgaacccgggaggcggaggttgcagcgagccgagatggcgtcactgcactccagcctgggcaacaaaagcgaaactccacctcaaaaaaaaaatagtcttgatagcactgcaaagacttcgtgtcatttcacaatcacagttagcttatttgatcactccttccctacattcctctcattgtacaaattggtaccagatggaaagtgctgactgtgagatgtccaggttcttgacgcattgaacaaagaattgaacaaaacacacaaagcaatgacagcgcagatttatttaaatgaaagtacactccacggagcgggagccggccctagcgggcagctcaagagccctgattgcaatgttctttagggtttttataaggctacaagaattttgtaacacccctaggtgccctttagagaactccaattggttaccccctatgaaggattcgcctgcaaccaatcagaggctgaagtgaagacttggccatggccaatcagaggctgaggtggagacttggccctgtcaaatcagagtctgaagtggagacttctatcttgttatcacagcagtgaggatgtggcctgtttctgcctaatcttgcctagaagtggctgcacctgctgttcctttgcttatgccttaactggttatcctaattccctattctcctgcctcaaaatgacaagttaatcacaagcagcagactcatggttaaccttacatatcccaaaatagtaatggaatgtctccatagtgaaagcctgatgtgtcttaccacctgtattgggcactgttcgaatttttatatttcaagacaagtcatcttcttctggataaaaaataaaattacacagtttgccaagtatggcattaggtgttttgttgttgttgttgtttgtttgttttgagatggagttttgctcttgttgcccaggctggggtgcaatggcgtgatctcagctcactgcaacctccaactcccaggttcaagtgattctcctgcctcagcctcccaagtagctggggttacaggcgcatgccaccacacccagctaattttgtatttttagtacagacagggtttcaccatgtaggccaggctggtctcgaactcctgacctcaggtgatccacccacctcggcctccgaaaatgttgggattacaggcgtgagccaccgtgcccggccagcgttagtttttaaccagagtattcaaaagcatccatttatatgacattctggatagagcaagagtataggaatttagaaccagatgaggcattaagggtcacaggacagtttgtctccaaaagggcagaaggaggcttttaggggtgacagagtgttttgtatcttgattatggtggtacaagtatgcatttgtgaaaacccagctccatttaaattgtaaagtttactaattttaaataacggaaaacaaaataagcaaagtctcattgatgaactaagaaaaaattaaaactcatccaatctttgatgtttagtttgcaacaatagtagtttccacttctcaaagactcgtgacccatcaagacttttttggaacccattataaagttaggaagcacttgccagggtcatagctgccctcaccgcagccacttaacctgagggaagccacagggcaccagcaatgcccctctaagttcacaccaagttcctggggtcagaactctgagaatgctgtggtttggaacctaaaaggaattctacagagttccaaaggggatccttgggtggagggaaggagtgtcttatccttgggcatttgaatcacgtcttccaaggttctatcctgaggccatttgcagctcagttctagctccctgacatatcagggtcaaacccagttttgtttttgttttgagacggagttttgctcttgttgcccaggctggagtgaaatggcgcgatctcagctcactgcaacctccgcctcccggattcaagcgattctcctgcctcagcctcccgggtagctgggattacaggcatgcacgaccctgcccggctaattctgtatttttagtagagactgggtttctccatgttggtcaggctggtctcgaactcctgacctcaggtgattcgcccgcctgggcctgcaagttgaacctgcatatctttggagatctggaacacacgctaagttcagaaccagaaccggaagtgctgaggagctttccttctagtcccgcccctcacgctgtcgcttacgcttccagttagcaacttggtcgtggaaaacacctgcctgtggccaagagacgtgaagttagagcttcagaagcgtccaggccgggcacagtggctcacgcctgtaatcccaccactttgggaggacaaggcgggcggatcacttgaggtcaggacttagaggccagcctggccaacatggcgaattcctgtctctgctaaaagtacaaaaattagccgggcgtggtgacgcatgcctgtagtcccatgtactcgggaggctaatgcaggagaatcgcttgaacccgggaggcggagcttgcagtgagccgagatcgcgccactgcactccagcctgggcgacagagcaagactccatctcaaaaaaaaaaaaaaaatatatatatatatatatatatatgaataaagtaatctcacatttgaatgaagaatcatgaatcctaatgggacaatagggtgcccaactgttcatatatttataaaggagtgggacttattccaggaacttaaatgtttccatattggaaaatccaaatacgttcatataattcaccaaggagatgagaaatatcctcagggaggtaagggtgtatttgtacataagtaaatttctatttctgtttagaaatacttgtttagatcgcttctcggccttttgggtaagatcaagcgtaaaaatacttgtttaggaaaataattccttaaagtgattaaaaatacaactatctcaaaattagagccaaattcaaagacttcatacattagtagggtcacctggtgtggatggaaggacatgtcacataatgccagtgttctgactttctatggctgcataatgccgcccccaaaattatttatttattttttattttttgagacggaggtttgctcttattgtccaggctggagtgcaatggtgcgatctcggctcaccgcaacctctgcctcccgggttcaagcgattctcccgcctcagcctcccgagtagctgggattagagatatgtgccaccacgcctggctaattttgtatttttaggagagacgcggtttctccaggttggtcaggctggtctcaaactcctgacctcaggtgatccgcccttctcggtctcccaaagtgctgggattacaggtgtgagccaccgcgcctgcccccgcccccctaaaatttagatcacaacaaccacatttattttgctgaggaacctgatatttatccaggactgggcagaggcagctcatctttgccattctccagttccacacgggcacaaattggggtggttttttcgcattcgtttttatagggcctttcacgatgtctttttatctcgggaaccatggggaactttacggcaagtaacaatgttcacacataaaacaggacggtgtcatttttctctttttgtgcacacaagtgtcaatttttactgcaccatcagtaagtctagatttaatccaatatgaaagaaagtcaaacccatcacaaaagagcaaggttattctggcttgagctctaaaatgcacaagtcattgtcctctgcagtcttgtaaatagcctgacatcagttgttttaaggttttaagtagtctgcgttttcattagttatcactagatggtagcagagagcatcggtcagaattaataaaagagggttaaaccagctcaagcaagcgaagccaatggctgtagtatttaggaagctgctcagaccaaggctatggctgaagcagcccacccattctacacacacgtggggcccaggaacctttgtaaagtcctctactgttggaccttgtgtcttgccaagtggctgtcagtgtaggctggcatttagtgctgcgtggccttattgatggttacaaccattttttctgctttggtaccacccgccatctaccggaactcttcagtacatctccacgtggatctgagctgagcttctcccgctttctctgagagcatttccagccaatatgtgtctgcttggtcatgtccttgcctctgccccttagccaggaactttacacaaacataaaatgtatctatacctctacatcatgccataaatgaaaattgtttccagatttatcaccgaagataaatgtgaaaacataagagatcatgaattggaataagcaaacatttctgaaaacacaaaaacaccataaaatagaatgaacagatattagaagctacaaaacaaaaggcaccatagcagagtgaaaagagagtttatagaatggaagaagaaacgtgcgatacacagatctggcaaagggcttgcatacagagtctaaacgctcctataaattactaagaaggcaggcagcacaatagagaagtaaaattacagatttgattaatcattcacaaaggaagcttgtccaagtggctaatatttaaatgataattcagttttttcttaagggaaatgcaaattagagcgaaaatgacatactactactccctaccatactgactgaaagcccaaaacatccaggaaaatgctattgctgaatatgtgcaacagaaatgctaagttgtggctggcacagtggctcacgcctgtagtcccagcattttgggaggctgaggcgggaggatcgcttgcgcccaggagttcaagaccagcctgggcaacacagtgagaccaccccccccatctctaaaaagaaaaaataaataaaaattaaaaaaatgctaagttgctacaacgtctttggaaaactgtgccttttgcatggctcggtatgtttagatacacaaatccttattgtggtggagccccttccttccgagctttccggaaaaccaacgacacaactccccaaacaggaagcacaacccgcttgcacctgtgcaccatgctcggttggagctcccagctgcctccagggcacagcggctttggaggaggggccgcgttgcatgctgggagcaatctgaggggcgggaccctagcgtttaagggctgtccttttttgaaccacatttccaaagcgctcgggttccccgagtggtgccccaagcagtggacgagcaaggtgcccgagaaggaggggaccacagacaccgcctggtgtccacggactaccaggaagccagggggcggtggcctccgtggggaatgcgcatgtgcggtcccgagcctcaggctagcgttcgggactagagtggggcgtcgccgccgcatgttgcacctgtcggcagcgcggcctctcccggatgtgacgtagcgtgacgcctgcaggattgatgctgaaatgacgaggtggcagcgccggttcctgtagctgaggggtgtgagttcgaggtctgattgtcctcgttttctacttccggtcacctcactgccacatggcaggcctccaggggaatacgcttaagatgagacacctgcgcatctctctttttttttttttttttttttgagacggagtctcgctctgtcacccaggctggagtgcggtggcgcaatctcggctcactgcaagctccgcctcctgggttcacgccattctcctgcctcagcctcccgagtagctgggaccacaggcgcccgccaccacgccccgctaattttttgtatttttagtagagacggggtttcatcgtgttaaccaggatggtctccatctcctgaccttgtgatctgcctgcctcggcctcccaaagtgctggggttacaggcatgagccaccgcgcctggcctctttttttttttttcttttgagacagagtttcgctctgtcacccaggctggagtgccgtggcctcatcttggctccctgcaacttccacctctcaggttcaagccattctcctgcctcagcctcccgagcagctgggactacagacgcgcaccaccacgcccagctaatttttgtatttttagtagagacggggtttcaccatgttggccaggctggtctcgaactcctgacctcaggtgatccacccaccgcggcctgccaaagtgctgggattacaggcgcgagccagcacacccggtcacacctttgcatctctaggcaagattcgtagtcagaagacacaaaaccagacttggaattcctgatttagggttgaaatggcctcaagcctgggaatacgtgcagatacctaaggactggaattccgcccaggatgaccctcaaagggaagttcacgtttcagacctacggtgtgtgcagagctcaggccccaggaacttggggacagaggtgccttctcgcttctctctgaatctgtgtctgaggtgagagaggcatggccctggtggcctttcttaatttcaggttgggttccaagaaagcaatgacggctcgcgatttcttctttctcacgccattctctgttcggttgccaaggaagtggaaaaaaattggttttgcttatctaaaaaggttcaggtgagtttatttttattatttatttatatgtatttattttttgagatggagcctcgctctgtcgcccaggctggagtgcaatggtgcaacctctctgcaacctccgcctcgcgggttcaagcgattctcctgcttcagcctcctgagtagctgggattacaggcattcgcaaccacgcccagttaatttttgcatttttagtagagacgggtttcaccgtgttgaccaggctggtcttgaactcctgacctcatgtgatccacctgtctccgcctcccaaagtgctgggatgacaggcgtgagccaccatacctggccgacttgctgtttaattcagcaaaaaggtgttgtatttctgctttgctgtgacatgtatcggaaaattgagcatatggaaataatgagtgtgaagagcagcatgtgctcctgtttgggcattatgcctcattagaaaaaaatctggcctttccggaggttgcagtgagccgagattgtgccactgcactccagcctgggtgacagggtgagactcagtctcaaaaacaaaacaaaacaaaaactaccatctcctataaaagggcattaaaattttccaaaatttgggattttgaacaccgtcccaatttagtatcaaagtatttttgagaatgccaaatatcctttgatactaaattgggacgctgttcaaaatgacacagtgtctgcagctcaccttcattattcctagactctcccttaccatccacagctcttcttgcatctaccggatcaccaagaacttgcacagctatcattctgcttgtaggaaagggcacatgctggattaaaaccgtgcagatgaccacatccttttacaaaccaggggcaactctgtggcttcctaggctacagattctctcagactacactagcagcaaattgagaaggccacctctttaatacaatttacaattcattcaaaaggactctataaacagccacacttgatggcccgaataactggtgagactctggtgaccttttcacttcataggtacatatcatattacctaaagcttttgagcattgcaaaaataaagatggaccggccaggcatggtggctcacgcctgtaatcccagcactttgggaggccgtggcaggcagatcacgaggtcaggagatcgagaccatcctagctaacacggtgaaaccccatctctattaaaaatacaaaaaattagccgggtgtggtggcgggcacctgtaatcccagctactcaagaggctgagccaggagaatcacttgaacctgggaggcggaggttgcagtgagccacgattgcgccattgtactccagtctgggcaacagagcaagacttcatctcaaaaaatcaatcaataaataaagatggaccatgagagttttattttgtaggaaattattactctgttaactccatgaatgcaggactgggtatcactccacactatttacaaacaccctgagcagtccctgtgatagtgtttacttaacacatactgagtgatggaaatataaattaataaatacatcctcattctccaatgccccaccatccatagaaaaaatgcaaaatacgtccctctgttttcccgattatctcccttgtggattattttcttccaagacccatttttttttttttttcggacgaaatcttggtctgtcgccaggctggagtgcagtggcaggatctcggctgacggcaacctccacttcccgggttcaagtgattctcctgcctcagcctccccagtagctgggattacaggtgcctgccaccaggcccggctaatttttgtatttttagtagagacggggtttcaccatgttggccaggctgatctcgatctcttgacctcatgaaccgcccacctcagtcccccaaagtgctgggattacaggcgtgagccaccgcgcctggtccccaagacccgtattttttatatcaagtctctacttgttacattaaaatctttactttttaaaaaaaatctcttttcccagaaaaatacacgccctcgaactgcgaggacttattctatattgagagcctgctgtgtcttgattacttttcagcctaattttttgttttgagcttacaatgcctggtatataagagaggctcaaaaagtaggatcaggttaaaatcatggtctttgggctagaaggaatttttcttttcttttcttttctttttctttttcttttttcttttcttttttttttttttttgagacagagtctttctctgttgcccaggctggagtgcagtagcacaaactcggctcactcccgggctcaagtgactttcctgcctcagcctcccaagtagctggaactacaggcacatgccactgcacatggctaatttttgtattttttatagagatggggtttctccatgttacccaggctggacttgagctgctgagctcaagtgatccgcccacctcagcctcccaaagtgctgggattacaggcgtgagctactatacccagcctacgaagacttgttctgaatcctgatcctaccttataacttgctagctttgtaatctgtaagtctgttacccacaaaaggagacaataaatgtatctacattatagttttggaagattaagtgaatttatatatgttcattgaattataggaaacaaaaccataccagatatatggtaagcaatattcaactctttacatggaaggaaaaatcagcccttgagaactgggacctggcctggcattcgtcccacgccacatgattctgttgaacagcaatgattttacaccaccccgacatcagatggggccacggggtgagaatgagcaaagcaaaaacaagagtgcagggaagttctccaggtggcctgagactgacccaatcttccccactcttgactgtagctctcaagaataactagaatgtactgggaatgcagccgggcacggcggctgatgcctgtaatcccagcactttgggaggccaaggtgggcggatcacctgaggtcaggagttcgagaccagcctggccaacatagtgaaaccacgtctctactgaaaatacagaattggccgggcgtggtggctcacgcctgtactcccagcactttgggaggccgaggcgggcggatcacgaggtcaggagatcgagaccatcctggctaacacagtgaaaccccgtctctactaaaaatacaaaaaattagccgggcatggtggcgggcgcctgtagtcccagctactcaggaggctgaggcaggaaaatggcatgaacctgggaggcggagcttgcagtgagccgagattgcgccactgcactccagcctgggcgacagagccagactccatctcaaaaaaaaaaaaaaaaagaaagaatgtactgggaatgcaacattccgagataagcggggagctggctagaacactcaggttctgctctagtccccgcaagaacaggatgttctgctttagcccagcatgttctcttgcccctgaggtatatcacctggggcaggctgccttttggggtccctaatatggagtgcaagtgaggctccatctgctccatttgagactccatctgctccaggcagctgtctgagccttggaggagcagctcacaatgaattgtaggcttctgttgtcccttgctgcctatctgtaagtaataaacccatgaaattccatgtaactcaacgagttccatgtaacttgttgtatgtgggtgttctctctcaccagagtcagataagttgctaaccagtgcacactgaacctgcttcacaaagagtactgtgtaatcatgtcattacacggaataaaaaattatgcaaacaggccaggcgctgtggctcacgcctgtaatcccagcactttgggaggccgaagcaggtggatcacgaggtcaggagttcgagaccagcctgaccaacatggtgaaaccccgtctctactaaaaatacaaaaattagctgggcgtggtggcagccgcctgtaatcccagctactcgggaggctgaggcaggagaatcacttgaacccgggaggcggaggttgcagtgagctgagatcaggccattgcactccagcctgggcgacagagtgagactctgtctcaaaaaaaaaaaaaaaaaagaagaaagaataccaaatttttttttttttttgagatggagtctcactctgtcacccaggctggagtgcagtggtgcgatctcagctcactgcaacctccgcctcccgggttcaagcgattctcctgcctcagcctcccgagtagataggattacaggcgcgcaccaccacacccagctaattttggtatttttagtagagacggggtttcaccgtgttggccatgctggtctcgaactcctgacctcgtgatgtgcccacctcggcctcccaaagtgctgggattacaggcgtgagccaccacacctggcgctcccagccttctaacatgcaacttctgagatttccattcctcatgctgtgtggtcacctcattgtgaaataagtcaacagaccctactttgttcaactgcagttgtgtttctcatgggtttgggctggtgagcattgacataattaatgtgtgagcttttcttcttctgaataagtcattttaatgagaaaaatgtttaacattataagagtttaaaaattcacataaaaattctggaacatgcactatagcatcagaacatatttaaaaatatacagttatacacatgatttgacaatccataattgtactggaatattttaacatatcccttctcaatacatgaaagatagttaaaattttaagtttacagcaaatataaaaacagttctaggattgttctaagaaatacctacagaaccttgtgtttggcaaaaaagtagattatttttgcaaacataaaaattatgataacacaagtttatcatttagaaactgcattcagctctgaatgacagaagactcctataatctgtttcgtatatctacaaagtgcatacttctcatatgtattgtccagaaacaaaaagtacagggtaaatgcaaccacccaacactacaatcaggaaacaatttcctgatgccataattgtaactttcagggtacagtcaagaacatgaggacaggccgggcacgggggctcgcgcctgtaatcccagcacttggggaggctgaggcgggtggattacctgagatcgggagtttgagaccagccagaccaacatggagaaaccccgtctatactaaaaatacaaaattagccgggcatggtggcgggtgcctgtagtcccagctactcggaaggctgaggcaggagagtggcgtgaacccgggaagcggagcttgcggtgagcagagatcacgccactgcactccagcctgggctagggagtgagactctgcctccaaaaaaaaaaaaaaaagtaccgacgttgacatgggaaatcttgtacaacacatgatgtactctagattttatcatcttcaaataacaaggtctaccttcttacttcataacttttgtgtccaattcccagccaggagctgggagacacagaaaagggtaaaagagaaaaatgagtcagatgagggtgtccctaggccacagccttgtattttgcaatttctgccaggatcatgaaatactgtgtccactgagtaaaaaaaatgctgaatatacattttctaatactaaagactaaaaccctcaaaaaacatggtgaaaccccgtctctactaaaaatacaaaaaaaattagctgggcatggtggtgggcacctgtagtcccagctattcgggaggctgaggcaggagaatggtgtgaacccgggaggcggagcttgcagtgagccgagatcgcgccactgcactccagcatgggagacagagggagactccgtctcaaaaaaaaaaaacaaaaaaacaaaaaaaacgaaaataaataacctttaagttcaaactttcagcctgcagaactatgagagaataaatatgtttcattcggccaccaactttgtggtgatttgttacagcaccccttgcaaacacttaaaggagtatttaccagctgtttctctcaaaaagaatgagaaataatgggctagaggtctactttaacataaggcactaataaacccatggctcgacttaagacctttataaacattttctaacggtattgaatttattcagtacagtaagtcatccgcacggaacctttgccacattacttactaacatagggtttccctccagtgtgagttttcatgtgttattttaaggatgggagaccacagaaagcttttccatgctgcatacatttagagagtttctctccaatgtgaatccttatgtctttgtaaggacgagagtctaccgaaggcttttgtacactccttacattcgtagggtttctctctactgtgagttctcaaatgtcctcgaaaagatgatgaccaactgaagactttcccacgctgctcacacacatagggtttctctccaatgtgaattctcacttgtgttcggaagtatgagggactactgaagactttcccacattccctacaggtgtacagtttctctccagtgtgagtccttatgtgtcccttaaaggaggagggagaactgaaggattttccacactgtttgcatccacagcgcttttccccagagtgtgttctcatgtgaaccctaaggtccgagggccaactgtaggtgttcccacattccacacacctgtaggctttttctcccgtgtgcattctggcatgtatgatcaggtagaaggaacgaaagaaggccttcccacattctttgcatttgtaggctttctctggactgtgaacattttttttttttttttgagacggagtctcgctctgtcgcccaggctggagtgcagtggcactatctcagctcactgcaagctccgcctcccgtgttcacaccattctcctgcctcagcctcctgagtagctgggattacaggcacacacaaccatgcctggctaattttgtatttttagtagagacagggtttctccatgttggtcaggctggtcttgaactcccaacctcagatgatccacctgcctcggcctcccaaagtgctgggattacaggcatgagccaccgcgcccggcttgtattttttttatagagatgggctctccctatgttgcccaggctgatctcgaactcctggactgaaacgatcctcctgccttggcctcccaaagtgctgggaatacaagtgtgagcaaccacatctggcccaacttgcataaaaccttctaagtaggcggccacatttttttcaattactttccattgctaaaatttctctggtcaatttcagacacaatgactgacaggccagcctgctactcatagaaggtctggctacagaacatgagaagaacaggtaggtgccagcaggcttccaagtgaaaggaacacccattttcacttcaattatttatccctgcttgaatgtaacatcgtcaaaaatcaccatgatagataaaaagaatgtaacggtagaagtaaatcttgtcattggaagtgataatattgcttttctgagaaactaaacataactgcaaaactgccagaacttgataaaatacgtgcaatatacataattaaatgtattgatggactaaaatttcattttctggaaaaagtatataaaatattgaggaagaggctaaacaccacctgccgggtctgtgtgaggacaatttcaggtatctcatgagaaggtgacagagaggtcgcccatgggtatataaacaactttgtgagggcgaagactcctcaattcaaatgcatttgcattctgtaagcatattgagttcagtgggccaggcacggtggttcatgcctgtcatcccagcattttggggtcctggcgggaggccatgagttcaaaatcaacctgggcaacataggtagagcctgtctacaaaaaataaaaagagttaactggtccacgggttctggtttacagtgagctggtttttttgttttttgttttttggtttttttttttgagatggagtctcactctttcaccagggctggagtgcaatggcacgatcttaactcactgcaacctccacctccctagttcaagccattctcctgcctcagcttcccgaatagctgggactacaggcgctcgccaccatgcccagctaatttttgtatttttagtagagacagggtttcaccatgttggccaggatggtctcgatctcttgacctcgtgatccacccgcctcggcctcccaaagtgctgggattacaggcgtgagccactgcacccggccgagctatgatcttgtcactgcattctaccctggacaacagagcaagacgttgtctcaaaaaaaaaaaaacacaaaaaaaacaagagagagagattgagagacagttaactggtttatcccaaatttatttatttaattttatttttaaattaaatttaattttttttttcagacagtatctcattcttttgcccaggctggagtgcagtggcaggatctcagctcactgcaacctccgcctcccaggttcaagcgattctcctgcctcagcctcctgagtagctgggattacaggcacgcgccaccaggcccagctaatttttgtattttagtagagacagggtttcgccatgttggccaggctggtcttgaactcctgacctcaggtgatccacccacctcagcttcccaaagtgctgggattataggtgtgagccaccacgcctggcctggattttgttttttttttttttttttgagacggagtctccgtctgttgcccaggctggagtgcagtggcgccatctcggctcactgcaagctccgtctcccgggttcagccattcccctgcctcagcctcccgagtagctgggactacaggtgcccgccaccacgcctggctaatttttttgtatttttagtagagatggtttcaccgtgttagccaggatggtctcgatctcctgacctcgtgatccacccgcctcggcctcccaaagtgctgagattacaggcttgggccaccatgcccggccccggatttcttgatctaaagaatgtccgccgggcgcggtagctcacgcctctaattccagcactttgggaggccgaggcaggcggatcacgaggtcaggagttcaagaccagcttggccaacatagtgaaacccccgtctctactaaaaatacaaaaattagccggacgtggtggcaggcgcctgtaatctcagctactcgggaggctgaggcaggagaatcgctttaaccctgaaggcggaggttgcagtgagccgagatcacgccactgcactccagccggggcgacagtgtgagactccgtctcaaaataaaaaaataaataaaacaaaaaacaatgtccaacaaaaaaacaaatccagcgaggccagacaggataggggctccctggggtccgcccattttcgggatcaggtgactcgaggtttggtccttattttagtgcaggctcagatgtcgggggcgagccaaagtgcaggggcctgtgggaaggacaggaggctgggaaacgtttgggtaaaaaaatcaggacactggccgtgcgcggtggctcacgcctgtaatcccagcactttgggaggccgaggcgggccgatcacgaggtcaggagatcgagaccatcctggctaacacggtgaaacctcgtctctactaaaaatacaaaaaaattagccggcgtggtggcgggtgcctgtgtcccagctactcgggaggctgaggtaggagaatggcctgaacccgggaggcggagcttgcagtgagccgagatggcgccactgcactccagcctgggcgacagagcgagactccacctcaaaaaaaaaaaaaaaaaaaaaaaaaaaaatcaggacactgacagcacgtgctccagcacggggcagggcctccatggggtccgcgcccacgcggggcagcgcggtgacgtcacggctgaggaccccgccccacgaagggctcaccccacgcgacccacgccgctcgctcgcccctcccctccacgcagcactccggctgctccgtggggaaactgagtctggacttctcgtgcccgttcgggagaaggacgcgggaggcgcggccgagctgcggggagaggttgggctcaccccgggccagagcgagttcgcgcaaacgggagtgtccaccgctggcgggtcagccactagcgttggctacgcgccggtcactcgggcgacaggaggcggggcggcgcggaagttatcttccaatcaggtgctccgggggcgggtccggaaaactgtccaatcaaggcacggggcggacaccgggaagcggattgcaggtttgcagtagtgtccaatcgaaggccccaggggtgaagggggcgtgtccaaaacgctgtccgctcagagcgttgaaagggcgggggcttagagattgtccaatcagggcgccgcttcctgagctccgaggccccgagggcgggacgtttcgtcctccctgccgcgcgtgccctgcctaccacgagcggcccgggagtacctgtacctttcagctgcgccggccgcgaggccacggagagctcgccttggagagcccaggagcaggggagacatggtgagtgcgaggcaggagcagagccaggggacggtcggagcgacgggaaccggctggaaccagagtccgccgaagtctgcggccgggattggctgagggacgcgcggggcggcgcaggactagcacctgggacccggggacgccatcacagcggccgggctggaggactgggggcagtttggggggacggaaggggcggcaaggagcttgggggtaacttagggggaggcctgggcaggaggggggctggaggtagtttggggggacggtaggggcggtcaggggtcagggaccagtttggggggacggcaagggacggtcagcaggttggggatgttacgcgtgtccgtataagaggtcacctgagcaggcttagtgtgagccacaaggctgtttactcacttgggtgcaagtgggctgagtctgagaaaggactcagcaaagggtgatgggattattattggttttatttttttattttttttatttttgggacggagtcccgctctgtcgccaggctggagtgcagtggcgtgatctcggctcactgcaacttccgcctcccgggttcaagcgattctcctgcctcagcctccggagtagctgagattacaggcgcccgccctcacgcccggctaatttttgtttttagtagagacagggtttcaccatgttggccagaatggtctcgatctcttgaccttgtgatccgcccgcctcggcctcccaaagtgctgggattacaggcgtgagccaccgcgcccggcaatcattagtccttataggtttgggacaggcatcggagttaggagcagtttttttgaggacagttggtgggtgttacaaagtacattctcaagggcggcgacgatgtttcaaagtacattcacaagggcttgggggatgtattgtcacaagggctgggaggaatattacaaagtaccttcacaagggcgcgagcgtgtattgtcacaagggcggggtacattcacaagggcgaggaggacgtatcgtacaaagtacattcacaagggcgggggaatatcacaaagtacattatcacaagggcggggggcttgaccatggtgcggccagctcagagaaccttacaggggacagcttggggggatggcaagggacggcctgggggtcagaggcagtttgggggacgacctcagcggtgggagttagctgccctgggggttttgttgcagggtatcactaatgctgtgaaagctttattcgggcagccggtgtcagtaaatgtactgtactgttctcctgtttggcttttttcttctccttagtgacaataggaaaatgttcaagtgtgttttctgccttctggtccgtcaggataacacctgtttatcgtggggtacaggctaagcatggcctaaggaagtctctcaggaatattctgtctcccaccagaattgtagagaaagtgtgcgcagttccacatcttatagcagctagagatggattaaaatgttcataaaaatagtagtttttcaaatgccaaagcaatcagacaaaaaataatagttattcttccatacaaggtgcagagtttgcgacagtgtgtgatcgtgttccatttcagttcagctagacatgagattaatgcaaattctgcaaaaacctgtaaaactgaggcgtgttccattctggttagtttccagtttgtcaccaggagtattgcttcactgatccatcatctgtttgctgactgggaaaagcagtttctggccatgtaaagtcataaagactgccttggaactcccttcccccacttacacaaggggtggaaagcactgattctgctgcattctcactctacgggatgagggtctttgtggcatttaaagtgtagcacctggagcagggaggtgagccccaagaccggtgactccagctgagcccacagttgagcctgcactggaggccgctgagggtgcagcggggtctggctgggcagcctccacttgctcagtcctcctgcctcgtagaacagccgcagcgggaactgttcatgctgattgaggctgctgagcatgggaaagacgattgtcctggagatgtgcttgtgggcgttttagcctttctgaggttgcacctgtgctgtcttggagccgtttctaagcagtgggtttagtttatgctttaagtgttgtttttcttttttggagacactgtgtctcccaggctggagtacagtggcgtgatctccacacattgtatcatccgcctcccgggttcaagcaattctcctgcctcagcctcccgagtagctgggattacaggcacttgccaccacgaccggctaatttttatatttttagtagagacggggtttcgccatgttggccaggctggtctcaaactcctgaccttaagtgatccaccctcctccgcctcccaaagtgctgggatttcaggcgtgagccaccgcgcccggcctggattaagttttaatataaacaccagtggccttactgcccgcataaataggcctccggcctctcttcaacacctgtgtgctgctcccagcgctcatctctgttctgcccccagggtaaccactgtcctgattttttttttcattctctctacctttaccatttattatttatcaccatacagagttttaattttgcctcctttgaattttttttttttttcaggcagggtcttactctgtcgcccaggctggagtgcagtggtgcgatctcggctcactgcaggctccgccctccggggttcacgccattctcctgcctcagcctcctgcgtagctgggactacaggcgaccgccacctcgcccggctaattttttgtatttttagtagagacggggtttcaccctgttagccaggatggtcttgatctcctgacctggtgttccgctcgcctcagcctccgaaagtgctgggattacaggcgtgagccaccgcgcccggcccattcctggctaatttttatatttttttgtagagacggggggcctcgctgttgccccaggctagtctcaaactcctggactcaagcgatctgccctccttggcctcccaaagtgctgggattacaagcatgggccactgcacctggcctgaaatttcaataagtgactgtgaccattaatgcaccgtgaatagcagctcaaaaggcttttctgtggtttctttcctttgcgcacatgctggtgtctgagacagtgggtgacgcagttagttcaatcattccagcgtttgtcaggcttgggttaattcaagtgtgttcatttattttgtgtacttatttatttttagagacaaggtcttgttctattgcccaagctggagtgcagtggtgtgatcgtggctcactgcagtctcaaactcctggctttaagtcatcccctcacctcagctttccaagtagctgagaccacaggtgtgcaccaccacacccagccaaagttttttttgtttgtttctttgtttttgtttgtttgtttttgttttttttgagacagagtttcgctctgtggcccaggctggagtgcagtggcaccatctcggctcactgcaacctccacctcccgggttcaagcaatcctcctacctcagcctcccgaatagctgtggttacaggcatgtgccaccaagcctggctaatttttacacttttagtagacacagagtttcataatgttggccaggttggtctcaaactcttggcctcaagtgatctacctgcctcagcctcccaaagtgctgggattacaggtgtgagccacactgcacctggcctccctcgtagcttactgtctgtgtgtgggcatatgtgagcactttccatgcctggacgttgtaagaactaacttctgaatgggctctgctcttgtcattcacagtgagatgtgcattatgccgacgattgaacttgcagttgatgtggatgttccttattctcccatagatagcatctctccttgcccaggtgttaaactgcccctcgtttccagcattgttgcaacgcttgctctgtcatatattcatgcaccataaacacagcttcccatccttttgtgttggtctatttgtccatcctgacgataccatcctctaattactattttttctttttttgagatggagtcttgctttgttgctcaggttggagtgcagtggcacaatcttggctcactgcatcctccgtctccagggttcaagcgattcttctgcctcagcctcccgagtagctgagattacaggcacatgccagcacgcccagttaatttttaaatttttagtagagatggggtttcatcatgttggccaggctggtctcgaactcttgacttcaggtgatcgccccccccccctcggcattccaaagtatttgcattacaggcgtgagccactgcacctggccctcctaattatgattgtgatttaagtgccttgatgtgttttagaattgtccctctaccggcggaggcgggcggatcacgaggtcaggagatcgagaccatcctggctaatagggtgaaaccccgtctctactaaaaaatacaaaaaattagccgggtgtggtggtgggcgcctgtagtcccagctactcgggaggctgaggctggagaatggcgtgaacccaggagacggaggttgcagtgagctgagattgcgccactgcactccagcctgggtgacagagcaagactctgtctcaaaaaaaaaaaaaaaagaattgtccctctaccttgttctgtaggaaacctgattgttcttagacatttgcctttcatttcagttcttagaagtagtttttcataaattcaaaaacaaggaaaaaaaatgaggctggttttggatgtaatggaattgtattcaaaccccagatcggtctgagagatctgctgacgtggtggcattgtttccttcctcagtccgcgtgccatctctcatttctctctcctttgatgtcattcggtagtgttttataattgttccatgatgattgttttatatccttcattagatataaaattcctctgttgcccaggctggagtgcagtgatgcaatcatggctcactgcagcctcaaactcctgcactcaagcgatcttcggcctcagcctcctgagtagctgggactgcagattcatgccaccacacccagctaattaaaaaaaatttttatagagctggggtcttgctgtgttgcccaggctggtctcaaattcctgggctcaagcgatcctcccgcctcagcctcccaaagtgctgggaggaaaggcgtgagccatggtgcccggccctgagtgtgaattttaaaaggctaatgcccaagcagtgtatcttagtaaggacaagcaggcctgaaggagctttggaacactgaagacagagcaagaaaaatatgccagtggggctcagatcaagtattttagcaatgttgattattctgttgtcattgtggagttgattgcacagccttgcccgtctacccatatgcaagaagcagcccctttgccgaaaccgccccctccctagctggccagtaaagaaacagtccaaagccacacggtcatctgctgcgtggctaccagggagcgtcgtcctggctgtgaagcttccagacagtcactgtctgctgtgtgtggttagaaggacttggacatccgtgttgtgtgcgcacaagactgtcctcgggggatgggccagagggcccaggtttgcctcggtgccataagtatcatttccatttcaggaaggaggttctgtggacccgtgagtgtcaccaccggaggcatcagggcagctccgggcagagaggcacagggcccgtgggagcctcggtctctagtgggctgtggaggccacatgggaggacagtgtcttgcaccagatccccatggccaattcaccgccactgggactggtctgagattccctgaggctggagcggaggcttcgagaacctctccagaggagtccaggcggggggtgggggcggggcagagtggaatcctgtcgtcattgcattttccacagaatctagaacctctgttgtcccacaagtaggctgatttctgatcgcacagatgggtcagagtaaaacctgtaagtgaggaatacgttctctccaaaacccagatagacctaaaaagtgttaggcttgctctggccgtgggtgttgataaatgaggtatgcttcctgcctgggctgctgcttcaaataacgaccagaaatatgaacaaagtggtggggacttgagtctagtggggtgcagcagctcgccccacctggaaagttctgcagcaggcccacgagcctgtccccgtgcctggctcttccgaaagcgcaaattaaatctctaaaatctaaaaccctctcatccccaaggccagctaccctcttgcacttcataatgtcataggaattatttttcccccatcctacacttcagtaggattttcattatcgttatgtcacagagagatccattcttttccattggttcgtttgtccatccttctgctaatactgtactggcaagattgacagctcttaaatccttgccctgtgttaggtaagccttcaccctgttcttcggaaagttttggctatttttagactctttttctctgttagatttggaaagtagttttgtcaagtcctaaaaagtctcattaagagaggatctcactctgttgcccagactggagtacagtggtgtgatcacagctcactgaaacctcctgggctcaagtgatcctgctgcctcagcctccctagtagctaggactgcaggcacatgccatcatgcctggctaattttaaaaataataaaaaaattgtagactgtgtctccttatgtcgcccagggtggtctcaaattcctggcctcaagcagtcttcctgcctcggcctcccaaaatgctgggattatgggcatgaaccacctcacagggccccaatcaagatttgtttctccattgaaatcctttactagccttaagtacttatttaactttggattttcccatagtatgtatcagcttttaaaaattaattttccaactattatgaagtagaaacataatgcaatttcttggaatcttggtaaaaatctttttctaggattatctctttgttctgttggggttttatgtgcataattcttagaaatttgcaaaaagacaagtttatgttttataattcttgtatatttcctggtggtgctggaactagtataacgttgactagaggtgaggtcatgggcgtcttcattttgtgtatcatgtttttgaggaagacagtgaacttcacattctttatgttttttaaaaaccagctttactgacatatagaacgtacagccatttaacgtgcacatttcattgttgttgttatttttttggtttttttttttttttttgagacggagtcttgctctgtcgcccaggctggagtgcagtagcgcgcactcgaagctccgcctccccagtagctgggactacaggcacccgtcaccacgcccggctaattttttgcatttttagtagagatagctaggatgatctcgacctcctgacctcgtgatccgccctcctcggcctcccaaagtgctgggatgacaggtgtgagccactgcgcccggccattggtttttacagtcacagaatcctgcaaccaagaccacagtcaacttgaggacatttccatcacctcacgaagaaacccccagacccttcagttatcactctcctattgccccggagcccctccaccaccctaagaaatgactcatctgcctctgtctctagagatttggctgttcttgacatttcgtatgttgtttctctttttttcctttttattcttttgttcttttgacatttcatatgaatggaatcctaatatgtgttcttttctgacggcttctctcactgggcatgttttcagggtcattcatgttttagcctgttagagctccattccttacatggctgagtcatatctactgtgtgggctgtaccacattttgtttatcagttgatcaactttgagttgtttccaccttttggctattgtgaatagtgctgctgtgaacatttgggtacaaatgtttctttaaatgttttcaaatttcttcagtatatatttaggagtggaatttccatttgataatactatgttaactttttttccttataatagattttattttatttatttttgtttttttttttttttttgagacagagtctcgctctgtcgcccaggctggagtgcagtggcgcgatctcggctcactgcaagctctgcctcctgggttcacgccattctcctgcctcagcctcccgagtagctgggactacaggcgcccgacaccacgcccggctaattttttgtatttttagtagagacggggtttcaccatgttagccaggatagtcttgacgtcgtgatccgcacgcctcggcctcccaaagtgctaggattacaggcatgagcctctgtgcctggccggtatcttgttttaatttgcatttccctgatgacatgatgtggagcattttttatatactcatctgccatctatatcttcacagatgagttgtcttaaggtctttagcctccacacctggctaattttttcttaattttagaaatggggtctcactgtgttgcccagggtgatgtgaaactcctgagctcaagcaatcctcccaccttggcctcccaacatgctgggattacaggcatgtgccaccacacctggcctatttgtacatgctttactctacatcgcactctcctgatgactacagctctccagaaagcctggaaaatgcatagtgtcagtcttccaacttgaaccttccccttcaatactgtgttggtattttgagtcttttacctctccatataaactttacaatcagtttgtcaatatccaccaaataacttgctgggattttgattgggattgtgttgaatctatagatcaagttgggaagaaccaatgtcttgacaatattgggtcttctatacgtggacatggaataactattcacttagttctttgatttcttctgtcagagttttacaattttcctaagatcttgtgcacattttgttagatttatacctgtatgttttattttagggcaatgctgatttaattccagtattgtctaagagcatatgatgtacgatattcttttaaacttgttaaggtgttttatgtcccaaaatacagtctaggttgaggagtgttccacgtgagcttgacaagaatgtgttttctgctgttgttgaagttgtctacagacattcatcattgggggtgctgttgaattcaactctgtgcttattgatgttccacgtgcttgatctgtttcttttcttttctttttttttttttttttttttgagacagagtctcactctgtttcccaggctggagtgcagtggcgcgatctctgctcactgcaagcgccgcctcctgggttcacgccattctcctgcctcagcctccccagcagctgggactacaggtactccccgccatgcccagctaattttttgtatttttagtagagacagggtttcaccatgttagccacgatggtctcaatctcctgacatcgtgatctgcccgcctcggcctcccgaagtgttggggttacaggcgtgagccaatgcgcctggcctaatttttatatttttagtagagacggggtttccctgtgttggccaggatggtctccatctcctgacgtcgtgatccgcccgcctcggcctccggaagtgctgggatgacgggcgtgagccaccgggcccggcctggttactgttttctgtttttgttgccctggttcgttgttccttattttgtcttccactctttttctgccttttttggttttgattgcatgttttgtgtgattccattttttctcctttcttagcaagtcaggtatgcttctctttcctttttttagtgatagccctagagatatttatttatttatttggcagggtcttgctctatcagccaggttggagtgcagtggtacaatcatggctcactgcagccttaatctcctgggctcaagccatcctgttacctcagcttcccaagtagctaggaccacagggtatatgcctccaagcccagcttatttttaaaaactttttgtggccgggcacggtggctcatgcctgtaatcccagcactctgggaggccgaggtgggtggatcacctgaggtcaggagtttgagaccagcctggccaacatggtgaaaccctgtctctacaaaaataccaaaaaaattagctgggcatgatggcgggtgcctgtaatcccagctgctcgggaggctgatgcgggagaatctcctgaacccgagaggcagaggttgcagtgaactgagattgtgtcatcgcactccagcctgggcgacagagggagagtctgtctcaaaaacaaaaaaaaacgacaacaaaaaaaactttgtaaagacagggtgtcactatgttgcccagactggtcttgaactcctggcctcaagcaatcctcccgccccagcctcccaaaatgctggcatttcaggcatgagccaccgcacccaacctagaagttttcattacatgtcttcaggctcagagtctttcctcagccacacccagtctactcatgtgtccattaaagtcattctccatttctgttacagtgcttttcaaatctctcccatggctttttcattcttaggatttccacttctcagcctgtattgcctgtttttgcatgttgtctactttttccattagagcacttcacctgttaatcatacttgttttaaattcccagtctgataattccaatgtccctgccatatatgaggggttctgctttatctcttcaagctctgtcttttgccttttagtatgccttgtcatttctttctggaaagccagacgcaatgtactgggtgaaaggcactgaagtaaatagacctttagtaacccagtggtgagatgtgggcagagggcaaggattccctgatcctttgatgacgtctcagtctattcttgagcctgtgccccgcgacactgaacttcacaagtgcttctcagttcttccttctcctctcacttggcgggacaagatgaatagaggaagatgatgggggatacatctctttccacaggtaatttagacactgatgaaaccccaacaggtgaggctctgatcaaatagttttaagggaaaggcccggtgagaaagagcagaaatatctagcctatttcaaaatcattattcttctcctctacaagactgggccccctgagattgctaactcagacttgggcccgctgtgcccccagcaattcatcagttacagctcagggtttcccatctaagtaacggttcccacagaggcttctgttcatggttgcgtgttctggtaagttatgactctctgtatccgcctctctcttcagtttgagggggcagagcttgccttgtgacatcagttctctgaaggatggaagaagagcttgttgaggtttcagtttgttcagctttttgttacaagggaataataacttccaagctccttacatgctggaccaaaaactagaagtcatttaacttttaaaaagaactgccacactgttttcttaattggttgtaccattttacattcccaccagcaatgtgtgaagattcctgtttctccatatccttgccaaaacttattttcttttttagttttttattttacccatcctagtgggtgagaagtggtatctcctttttgttttgatttgcatttctttgatgactaattactgacaatgtttatttttcttggagaaatgtctatttacatcctttccccacttttttgttgttgagactgagtcttgccctgtcacccaggctggagtgcaatggtgcgatctcggctcactgcaacctctgcctcctgggttcaagcgattctccctcctcagcctcctgagtagctgggattacaggcatccgccaccacgcccagctaatttttgtgtttttagtagagacggggtttcaccatattggctcagctggtctcaaactgctgaccttgtgatccacccacctctaaagtgctgagatgacaggtgtgagccactgtgcctggctgctaaatcagttttgtttgatcttttcaaacaactagctttggtttcattgatttttctctattgttttactgttctctatttcattaatttgcctgtaatatttattatttccttactcctaattgcttaggtttagttttattttcctattgtgtcgaggtggaccacgttaggttgttgatttgcaatctttaggataggtatttatagctattaacttcctttatataagttttggtatattatgtctttattttacatccatctcgaagtatttcccttttgatttctctttgatccattagttatggaggagtgtgttaatatccacatattagtgaatttgccaaattttctgtattagtttcagatttcatttctcattccattgtggtcagagaacatacttatttctggttttttttttggtggggggagactaactctcactctgtcagtgatgtgatcagagctcactgcaacttctgtcttcaagcagttctcgtgcctcaccctcccaagtagctgggaatccacgtgtgtgccaccatacccagcaaatttttgcatttttagtagagacagggtctcactatgttgcccaggctggtctcgaacacctgagctccagcgatccatctgccttgatctcccaaaatcctgggattacaggcgtgagccaccgcgcccggccaatattttgtatttctattgtttaaaatgtgttgaggtttcttctatggcctagcaaagggtctcttttacagaacgttcttctgcacttgagaagaatgtgtgttttgctgttgttgggttcagtgttctgcagatgtctgctatgtctaaatgacttatagtgttcaattattttatttcctcgtatttcacctagatgttctctcattaaaaagtggggtaattgatgatgctgtgctcaactaaaaaagaaaaaagaatgggtgtttatgtttcaacttgtatttttaattatccatttcttttatttttatttatttttttgagtcttgctctgtcacctaggctagagtgacattcttggctggagagcacaatcttggctcaccgcaacctccacctcctgggttcaagtgattctcctgcctcagcctcctgagtagctaggattacaggcacgcaccaccatgcccagcaaaatttgtatttttagcagagacgggggtttctccatgttggtcaggctggtctcaaactcccgacctcaggtgatctgcctgcctcggcctcccaaagtgctgggattacaggcgtgagccactgcacccggccactactttcattttcattaagtattttctaatgaaacctttcagttgtttaactttttactgtttgttggtctctttaggggttactgtattgtcaatgcgaggcttatcagatgagcttcgggtttatattcatcgctcgattccagtgagatacagaaatgctgcgtgtgtagctctattccttcctgcccctccaacttctatggcaatatgaatacatgctacatccatgaatattatatgccaaaacagtgcgttttaattagtactttaccatctgtagtcatgtccctttgcttaaatatgcctttgctccctcccaccctcctcctctgtgctgttattggcaaataggtattcttatgtgttatacatccaacagtgctttccaaacatattcatacagttgcctttaaaataatttaagaaaataaaggggaataaagggggaaaacggatacaatgttgcctagggctccaggcagacaaagacaggaattcttaagtcacattgttagaaactccctggccagcctcaggcccgtccatacaaagatcccctcaccaggcaggggattccaaggacttaccattttctgcagtagctggtggaaggcttttccgaaagtcctatgaaatgtgcatcgtttggacaaccgaggcctgctgcgttatgcaacgtttcaaatggaaaagttacttcatttgcatagcatttctctagaccctcctggtagaggaaaataagagcagtcgcagtaaaaaggcagagataagttcagactgatagtggtgccatgaagtttactaggaagtgattgtgaataagtaaaagatctaacattcgcgtcatagaggaggtgttgggacaccacagaatcttgtttgaatttatgaattgagtccagttccccagtactttcagtgtctccaatcctcctgcacacctgtgtggtttgtcttaggactcagtggtctttgaggatgtggctgtggacttcaccctggaggagtgggctttgctggattctgctcagagggacctctacagagatgtgatgctggagaccttccggaacctggcctcagtaggtgaggatggcatcattccttcccttggtttttaatgaactcatttctttctcatcagttctgttgcaagatgtgaaatgtgggaaaggactaagacagacatgttcacagccaccatggacctagaatctagtcattattccctaacagtgaaaacatgtgtgaaacagatgttatttctgtcttggtttaaaggacttgaagttcctttagtgtcattagtaggggtatagatttcactggtcatttaggatcacagagtggttccttgtttgatacctgtgacttactgtgtttgtgaaatacctaacattttgaccccttatgtctgttattgatgaggtcctcaaaatgctaaactcctcagtgtcttcctttgcttaatacgtgtcttattccttttgagatttgtttacttttttgttgcagatgatgggactcaatttaaagccaatgggtcagtttctctgcaggatatgtacgggcaagaaaaatctaaggaacagacaataccaaacttcacaggaaataattcctgtgcctacactttagaaaaaaattgtgaaggctatggcactgaagaccaccacaaaaatctgaggtgagttgcactcacaagagaaaaatccttgtatgcaattaaatatatatctaagtattgctccaaatataagcattgctccaaatttgtttattcctcagaattttaaccaaaaaaaaaaatttgtatttgactaagacattgagaatttgaaacataattgttagaagtaattacagggggccgggcgcgatggctcacgcctgtaatcccagcactttgggaggctgaggcaggcggatcacgaggtcaggagatcaagaccattctggctaacatggtgaaaacccgcctctactaaaaataccaaaaaaaaaatagccgagcgtggtggcaggcacctgtagtcccagctacctgtgaggcggaggcaggagaatgctgtgaacctgggaggcagagcttgcagtgagctgagattgcgccactgcactccagcctgggtgacagagtgagactccatctcaaaaaataaataaataaaaagaaattacaggaaaaccccatatataataaatactgcattaaaaaatatgtctcttcaaacaattcagaatagaaaaacttcacgtatactgaaatgtagttagacattatttctaatacttgttaatacatctcaacacatcattactaaacataccatacataaaaatgtctctcatttttaacagaaatcatatggtggacagattctgtacacataatgaaggtaatcaatatggagaagccatccatcaaatgccagatcttaccctgcacaagaaagtttctgctggagaaaaaccatatgaatgcaccaagtgcaggacagtcttcacgcatctttcttctcttaaaaggcacgtcaagtctcactgtggacgaaaagcacctccaggtgaggaatgtaagcaggcctgcatttgtccctcacacctacacagtcacggaagaactgacactgaggagaagccgtataagtgtcaagcatgtgggcaaactttccaacatcctcgttacctctcccaccacgtaaagactcacacagcagagaaaacctacaaatgcgagcagtgtcggatggcgtttaatgggttcgcaagcttcactagacatgtgagaactcacacaaaagacaggccatataaatgtcaggaatgtgggagagccttcatttatccctcgacatttcaaagacacatgacaacacacactggagagaagccctataaatgtcagcactgtgggaaagccttcacttacccccaggcttttcaaagacatgagaagacgcacacgggagagaagccctatgaatgcaagcagtgtgggaaaacattcagttggtctgaaaccttgcgagtccacatgaggatccacactggggacaaactctataaatgtgaacactgtgggaaggcttttacctcttccagatcattccaaggtcatttgaggacgcacactggagagaaaccttatgagtgtaaacaatgtgggaaagccttcacttggtcctcaacgtttagagaacatgtgagaattcacacgcaagagcagctctataaatgtgaacaatgtgggaaggcttttacctcttccagatcattccgaggtcatttgaggacgcacactggagagaagccttatgagtgtaaacaatgtggaaaaaccttcacttggtcctcaacgtttagagaacatgtgagaattcacacgcaagagcagctccataaatgtgaacactgtgggaaggcctttacctcttccagagcattccaaggtcatttgaggatgcacactggagagaagccttatgagtgtaaacaatgtggaaaaaccttcacttggtcctcaaccttacataatcatgtgaggatgcacactggagagaaacctcacaaatgtaaacaatgtgggatgtccttcaagtggcactcctccttccggaaccatctgaggatgcacacaggacagaaatcccacgaatgtcagtcatactcaaaagccttcagttgccaagtcattctttctaaaaccagtgagagcacacactaaagagaaattctataactttaatggggtaacctcacattaattcatgtataatgctccagaaaattcacaccaggagagaaatcttacaagtatgatattgtctttgtcaatacctcatttgtaaaacagacccattagtcgtgaatttccagctctttcaaaaataaatgtttatgtgagaaaataattctctaagtcctctttcagctatagtacctaagttttaatagttaagtgttttgtctcttaaatattttcatttcgaactgtattagacccatggtgatttgaagcatactttgaacatgacacaatttttttttttattttttttttgagacagtcttgctctgtcacccaggctggggtgcagtggtgcgatctccactcactgcaagctccgcctcccaagttcacgccattctcctgcctcagcctcccaagtagctgggactacagccacctgccaccacgcctggctaattttttgtatttttagtagagatggggtttcaccgtgttagccaggatggtctcgatctcctgacctcatggtctgcccaccttggcctcccaaagtgctgggattacaggcgtgagccaccatgcccggccaaacatgacataatttttatagtttctatatttttctgtatgggatcattacaacaataaaactttggtatttcttactggcctactgctacagatagtggatatcacttacctattttatatattgtaccttaccaaatttttttttgcaaaacctggtaaatatgcagagttctctataaagtatagtctctaatcatcttttgcaatttgtttttcctcatttctcactgggagttagacagcagcctttgaattaggaatggggacctacaaaacaagaatgaaatctgtagatggttttgttacggatatatgtgtaaggctgggaacgacatttccctgaatgtctttcctttatggcaccaagttaaaatctgctgattttctactgtgcatgaggtttggcagtcaggactagagaagtcattacccgctttgtagagccagcatactcagagacataaaggtggcacacaggcgcaccatgcacacagccttctggatcattgtactcattcctgccactgttaatgaagagtgtctctacaacagacaccagctgcctaactttcagccagacatctccatgagctctcccaacatgaagacatttagtgtggattgctacaacacctgccacgtccaccaggccactgattctgactgtcgtggtgatcatctctgaagctaactccctcctttaggtcttaccttatttttattttatttatttatttttgagacatagtcttgctgtgttgcccaagctgaagtgcagtggtgtgatctcggctcacaacctctgcgcctcccgggttcaagcgattctcctgcctcagcctcccaagtagctgagactacaggtatgcaccaccatgccccgctaacttttgtattttcagtagagacagggtttcactatgttggccgggctggtcttgaactccggacctcgtgatccacctgccttggcctcccaaagtgctgggattacaggtgtgagccaccgtgcccagcccaggtcttaccttatttttatactaaacattttcttttgttctcttagtactgcttatggttctgtgtgcagacacaaccatgacagcctatgcaccagccaaaaagcgcgcacacacacgtttgatcgtgtacagcatcgctgaatgactacttagtccatgtaagaataatcacctctcatatcaggcagactggtggagtttcctattactcagagccgagtgcaacccttcagtatatgttcaatactatgtttaattatatgctattaagaacaagacactttttgtcaaattcctctgtagtggtttcttagattttatcaaccatgttcagataaattatataataacaaatatttttactctgaagatataaatattccattgcaattatggaatatgaaatcaactttgtaattctgtcagtttaggcactatctattagcattcccagatgtgtaccagctcatgcactcttcttaaaggtcaatttttcatatacttaaaacttttgacattaacataaattcttttttttttttttgagatggagtctcactctgtcgcccaggctggagtgcagtagggtgatctcggctcactgcaagctccgcctttgggttcacgccattctcctgtctcagcctcccgagtagctgggactacaggtgcccgccaccacgcccagctaatttttttgtatttttagtagagatggggtttcaccgtgttagccaggatggtctcgatctcctgacctcgtgatccacccgcctcagcctcccaaagtgctgggattacaggcgtgagccaccacacccggcacttctaccctgacaatcttaaccaaagaactactcagggctgtttaaatggtggggagcaatagatacacaggtgtgcattgttggagttaacagtaatgactccccgtaacaataaacacgggtatgcttcagcttcatttttgcaatggtttaaacttttaggccatgtgatatgcggccatgaatttgaacatgattgtcactgatcagagggttcccatttgatgtggaccacagagcatcttacctacacaagttgtaagttgagtgttagcctagctcctgctgcagcaggtccctcccccagcctcctgcattccaacctgggtgccgggtgacatccaacatctgacggctatgatgttaaggctacaaatgctgcatttgatactgggggcacaattgccattattttataaagggggggccttcataaaagcccgggcgcggtggctcacgcctggaatcccagcgctttgggaagccgaggcgggcagatcacgaggtcaggagattgagaccccagtgaaaccctgtctctagtaaaaatacaaaaaattagccgggcgtggtggcgggcgcctgtagtcccagctactcgggaggctgaggcaggagaatggcgtgaacccgggagatggagcttgcagtgagccgagatcgcaccactgcactccagcccgggcgacagagcgagactctgtctttaaaaaataaaaaagcctttgtatggcaaggctcgccaggccaggtggctgacgcccgtaaatcccaacactttgggacgccaaggcaggcagatcacttgaggtaaggagtttgagatcagcctggccaacgtggtgaaaccccgtctttacttaaaaaatacaaaaattggctgggcgcagtgactgatgcctgtaatcccagtttctcaggaggctgaggctaggagaattgcttgaacccgggaggcggaggttgcagtgagctgagatcacaccactgcactccagcctgggcgacagaacaagactctgtctcaaaaataaataaaaataaaagcctttgtcgtatgtggctcttgcatctgaatgttaaaaattgacataaaacattaaatttttgaaatttcataaatagtagagggttcatcttatacggagaatgactgcatggcaaacgtgattgctgccaaaagctggagtttggtaagggcatagccaggcactgtgacctccacccattcctgacactgggctcttgaccccccacctgggggatgcctcactgctgatggcttgtgtttggctttctggattcactgcagtttgtaacagtggatggacagtttgaccctgcttccctcaccatctcctggtacacacaacttagtaaggtacttatccctcggaaacagacatcttttctgagctgctcactggataaatgatcaggacaaaagggatgggaggttacgtaaagccatcttgaaatttttttgataatttcatattttatcacaaccaatttttaaacctgtgtctttgagtaaatagcattaaaaggtttttctgtggaaaaactgttcctattccatacaacccttccagaagaaaggtctggataacactaaaggatgatttttttaaatgtaaaatgattgcccaatgggacacagtgactttgtaacaggaggaaatatccaaaagcatctgaggaggtggctggaggagggcagaggcgagtgttcatcttatttttcagaatctttcctgcaactttttccttcctcctgaaggaaaaccctctgtgctgctttccaaagtcccgtgagttctttttattttattttatttatttttttgagacagagtttcactcttgttgcccaggctggagtgcaatggcgtgatcctggcttactgcaacctccacctcctgggttcaagcgattctcctgccttggcgttccaggtagctgagactacaggcatgcgccaccatcctcggctaattttgtattttgagtagagatgaagtttcaccatgttggtcaggctcgtctcaacctcctgacctcaggtgatccacctgcctcagcttcccaaagtgctgggattacaggcgtgagccaatgtgcccgcccagtaagttctttgaacgcaaactgactgctgagcctagaccaccctgacacgccgtgagggagccacccagctgctattcctgccctgcagaacacccttagggccacagtggtgaaagtgatgatctgtggtcatagacaagcaaaccatgtggaactgactgcctcaggcagtccctctgaaatcggggactcaactaacctcattggacaggactgagaattctccctacagggggagtccgcgctgagtgtctgttaaccttcactgctgactaatggatgtcttgcttaggttgccctgacaattgtaaactcagtttccggcagtaccttgtgtgtcctgtgggactgtaatcaggtgtggaacctattgcaacaccgtctgagctgtggaagcttcaaattactggcaagagttctgctctaccacacacttggtaagttaggacaggtaaaaaggattcatacacaagtttaaggaggaagccaggtggctttctaaaatagacctttattttaactaagtccgaaacccctaaagggcatagctggaatcattcctgcaagctcattacccccatgctgtgacggtcttactgatgattattttgttgtaaagcaggggccaataggctgcactgcaaaaaacttagcaaaacaggcctgagtgctatcccttgaaaggcccgtttacaaggtcagctgtgtcaaaattgcacaagcaatatggtttatgcaaaacaccattcattccaggcatctggaatcttggtatttgccaagcagtgagtgcatcataaccagctggcaataaaaaaaaaccctggcagagtatctattgagcttctcaggttggtaaatagtcacacatgctgttacaattagtttcccgggcagtaaaagcatcttgtacgctgccaaccagggaggacccttggaagctcattcctggtttccccgacttcaccccatgtgcctcatccctttgctaatagttggctctgtttccttgcactgtaataagtcttagctgtaaggctgactatatgccagttcccttcagtacccctaacaaatcactgaaccactgggggtggccttgaggccccccagtacacttgacatcctgaaactgggaaattttaaaggcattttcataagagtggatggaagttttgtgttttaataatctgcaaagctcaaaaagcccattttgcttttcaaagatatgattttcataagtttgcacttccaccaaatgggctcacaggaaagagaagaaaatgtaatagctttctgtgtgcgtgtggtggggggcgttgtttctttgtagagatgaggtctcactatgttgaccaggctggtctggaactcctggactcaagtaatcctcctgcctcagcctcccaaagctctgggattaaagttgagagccaccacccctggccaatagctttgcattttgttaatgaggaaagcaaatgaaattctgtcaatttctcgatgttaagtactgcagagattaatatgacttaccatctcattgcacctcctgttcccagcttccctcccatcatacaaatgaagaaagttaagcacaaggaacacagaatcttaaccttaactcacatatcttgatgtaaacatagtaatttaacctctcagttttgaaggcctgttatctgccacctcttatacttagctctgtcgattgtttttttttttttttttccagacggagcttcgctcttgttgcccaggctggagtgcaatggcgcgatctcggctcaccgcaacgtctgcctcctgggttcaagcgattctcctgcctcagcctcctgagtagctgggattacaggcatgcccggccaactttttgtatttttagtagagacggggtttctccgtattggtcaggctggtctccaactcctgacctcaggtgatccgcccacctcggcctcccaaaaatgctgggattacaggtgtgagccactgtgcccagcctgtcaaatgtttttaaactgaaaattctacaagacaataataggctgggcgccatggctcacacctgtaaacccagcacttcgggaggccaaagtgggaggattgcttgagctcaggagttcgaggccagcctgggcaacataaggagaccttgtctctactaaaaaaattttttttaattagcaaggcatggtgctgcatgcctggagtcccagctaccggggaggctgaggcgggaggatcacttaagcccagacgtttgaggcagcagtgagctatgactgtgcccctcccactccagcctaggtgacaggatgtgacccttgtctcaatcaatcaataaatgacaagtataattagctaattttacaaatatggcatcgaattttacaaacagggctcaaaaggctacatatttcacgtaacatgacattctggaaaaggcaaagatacaggtggctaaagcagatcagtggttaggggtgaaaggttgagtacaattgggcaatccaagagtatttggggagtgatagaatgttctctgttttggtggtgtaaatatgcatttatgaaaactcatagaaatacgcttaaaatagtcttactgtatgtatattaaaaataatcaacaacaacaaaccgctttcgcttactaagagaaaatgtaaactctcctgaactttgaaaacatgcaatgtggctgggcgcggtggatcacgcctgtaatcccagcattttgggaggccgaggtgggcggatcacgtgaggtcaggagttcaaggccagcctgaccaacatggtgaaaccccgtctccacaaaaatacaaaaaattagccgggcgtggtggcaggtgcctataatcccagctactcgggaggctgaggcaggagaatcgcttgaacctgggaggcggaggttgcggtgagcccgagatagcgccactgcactccagcctgggcaacaagagcgaaactccatctcaataaataaataaataaataattaaaatgaaagaaaagaaaagaaaacgtgcaacgtttcttttaccacctttggatactcaggaagcactgaaggtctgaggaaggagggctcatgccccaaatttgcctgtactgatgttaggaaatgccctttcgggccgcgcctgctaagaacgcttctgtgagatttcagtttattcacgtccccagggtcagatctttggagatgctgtggttttgaaaacctaaaagcgcactccagttctcccaaagggggacccttcctagtggggggtcctaatcctcaagcatcagccgaggacttggcttcaggccagtttcgactctccagctcccataacaacccagttccacgacttcttcccaacaagcctcattaaagacccgcacctgcaccctctcgggagcacagttgcggctgccgggagaaagagctggaaaaagagtggttgggtccatgttccacggacacccgccgaccacggccacagccaccccacagccgcgtagccacctcggctccccaggacaaccgcaaccaccaacctcaaaggcgccccaccacgaccagcgcagacgcacccacacccaccctaggttcccccgacccactgcctctcggtccccgacatctgcaggcgcacccacacccaccctctgtcccccacaccggcagccacacccaaatgcactgcccctcggtcccccacacccacaggcgcacccacacccaccctcaccagcaggcccacccacacccaccgcccctcggtccctcacacctgcaggcgcacctgcacccaactgcccctcagtttcgcaatcaccgaggccggaggcagtggctgcacaagcaccagccataccagaccccgaagctcaccgcagcacccgcgcagtcccagcccgacaactgcgccggcgaggtccctgccccgggggcttgtgggaaacggcgacctcaaacggaggctgcacagtcgctcaaagccccgcccatcgagctcctcccggcatgcagcgcgcctcgcctcttaagcctcgtcccgtggggccccctgggattgcggacgccgctgtagcacgggcgaacttccctacttctgcgagggcggctgctgtggtttttccaggcgacagaaaaggggactcagacagggcgaggcgggagattacggacatcctgaacccctgccccgcgttgcagcagcttgcggtcatcttctgggtctggggagtggcatctgtggcggggcccccacccacgatggacgatgctctgtgtatgggggtgactgatgacagagattctggagggaccagggggccgctgtgaggctgaagagtgggggcgatgatttgtgggtgtgtccgtgtctctggatgtgtccatccttttgtccctggaacaaatgtgatttttgtcagccttgggggctactcctgcgtgtctgggaggactcgcttgttcgtggcggtccctgtacctggagtgcggtgactcccaagtgtcagtggtctcagtgcacagctgtagttttctgcgtctctgtattcctagtctgaaataaccaaaatagaaaatagggccgggtgtggcggctcacgcctgtaattccaacactttgggaggctgaggcgggcggatcacgaggtcaggagatcaagaccatcctggccaacatggtgaaaccccgtctctactaaaaatacaaaaattagctgggcatggtggcctatgcctgtaatcccagctactcaggaggctgaggcaggagaatcgcttgaagccgggaggtggaggttgcagtgagccaagatctcgccactgcactccagcctgagtgaagcagcaagacttccatctcaaaaaaaaaaaaaagaaagaaaataaaatagaggccaaggacgctggctcatgcctataatcccagcactttgggaggccaagatgggtggatccttttagctcaagagttcgagaccaccctgggcaacatggtgaaaccctgtctctatttttttttttttaataaaaagaagaccaggcatggtggctcatgcctgtaatcccagcactttgggaggccgagccagctggatcgcttgaggtcaggagttcgagaccagcctggccaacatggtgaaaccctgtctctactaaaaatacaaaattagctgggcatggtggcgtacgcctgtaatcccagctgctcaggaggctgaggcaggagaatcgctcgaagctgggaggtggaggttgcagtgagccaagatatcaccagtgcactccagcctgggtgaaacagcaagactccatctcaaaaaaaaaaaaaaaaaaaaaaaaaaaaaaagagaaaatagaggccaagcacgctggcttatgcctgtaatcccagcactttgggaggccaaggtggatggatccctttagctcaagagttcgagaccaccgtgggcaacatggcgaaaccctgtctctttttttttttttttttaataattaaaaagaagaagaccaggcatggtggctcatgcctgtaatcccagcactttgggaggccgagccagctggatcggttgaggtcaggagttcgagaccagcctggccaacgtggtgaaaccctgtctctactaaaaatacaaaattagctgggcatggtggtgtacgcctgtaatcccagctactcaggaggctgaggcaggagaatcgctcgaagccggcaggtggatgttgcagtgagccaagatctcaccagtgcactccagcctgggtgaagcagcaagactccatctcaaaaaaaaaaaaaaaagagaaaatagaggccaagcacgctggcttatgcctgtaattccagcactttgggaggccaaggtggatggatccctttagctcaagagttcgagaccaccctgggcaacatggcgaaaccctgtctcttttttttttttttttttaataattaaaaagaagaagaccaggcatggtggctcatgcctgtaatcccagcactttgggaggccgagccagctgcatcggttgaggtcaggagttcgagaccagcctggccaacgtggtgaaaccctgtctctactaaaaatacaaaattagctgggcatggtggcgtacacctgtaatcccagctactcaggaggctgaggcaggagaatcgctcgaagccggcaggtggatgttgcagtgagccaagatctcaccagtgcactccagcctgggtgaagcagcaagactccatctcaaaaaaaaaaaaaaaaagagaaaatagaggccaagcacgctggcttatgcctgtaattccagcactttgggaggccaaggtggatggatccctttagctcaagagttcgagaccaccctgggcaacatggcgaaaccctgtctcttcttttttttaataattaaaaagaagaagaccaggcatggtggctcatgcctgtaatcccagcactttgggaggctgagccagctggatcgcttgaggtcaggagtttgagaccagcttgccaacatggtgaaactccgtctctactaaagatacaaaaaattagctgggtgtggtgatgcactcctgtaatttcagctactcaggagactgaggcaagagaattgcttgaacctgggaattggaggttgcagtgagccgagactgtgccattgcactccagcctgggcaacagagtgagactttgtcgcaaaaataagtaaataggccgggtgcagtgactcacacctgtaatcccagcactttgggaggccgaagtgggcgggtcacttgaggtcaggagttcgagaccagcctggccaacatggtgaaaccccgtctctactaaaaatacaaaaattagctgggtgtggtggcgcatgcctgaagtcccagctacttgggaggctgaggcaggagaatggcttgaacccaggagacagaggttgcagtgagccaagatctcaccattgcagtccagcctgggcaacagagtgagacactgtctcaaaaaattaaatagataaatacaaatacagaaaagccagctgtggtggtgtgcacctgtagtcccagttactcaggaggctgaggcaggaaaatcacttgaacctgggaggcagagcttgcagtgagccaagatcatgccactgcactccagcctgggcaacagagtgagactcagtatcaaaaaggaaaagaaagggtgggtgtggtggctcatgcctgtaatcccagcagttttggaggccaaggcaggtggatcacctgacgtcaggagctcgagaccagcctgagcaacatggtgaaaccctgtctctactaaaaatacaaaaaaattagccagttgtggtggcacacacttgtaatcccagctactcgggaggctgaagcaggagaatcgcttgaacctaggagatagaggttgagccgggcacagtggctcacgcctgtaatcccagcactttgggaggccgaggcgggcggatcacctgaggttgggagttcgagaccagcctgaccaacatggagaaaccctgtctctactaaaaatacaaaattagctgggcatagtggcgcatgcctgtaatcccagctactcgggaggctgaggcaggagaattgcttgaacccaggaggtgaaggttgcggtgagcagaagacgtgccattgcactccagcctgggcaacaagagcaaaactccatctcaaaaaaaaaaagaaaaaaaaaaggagatagaggttgtagtgagctgagatcatgccattgcactccagcctgggtaacaagagtgaaaatcatctcaaggaaaaaaagaaaaagaaaatggaggctcagtggtcactgccgccactcagcatcagcaatgcaacgaatgcattcttggctgcaacattaaaactgccagggtggagtgaggaaacaggttacgattaaggaacaagacgcttactacagaaatcatgtaaatatgagaagagttggagataaaggggttcacaggaagaaaggagatcactaaatgcagtagcctggaatggcctgatgaaaaccagagggatggtgaaatccaaggatctctgtgtacctgaatcctaaagaggggacggtggtggggatgcttgtggaacagtctatggagtgtgctaagaggaaactaaagtcaaatgtcatgttggctttgggggctgttctagactagcagagccagaagtcagaaaaatgtattgcaatttaggtccgtaaggttaccacgtgtttgtttccgggtagtctattagaactgagaataggcagggtgcggtggctcacacctgtaatcccagcactttgggaggccaaggagagtggatcacgaggtcaggagatcgagaccatcctggctaacacagtgaaaccccgtctctactgaaaaaaaaaaaaatacaaaaaattagctgggcatggtggcaggtgcctgtagtcccagctacttgggaggctgaggcaggagaatggcgtgaacccgggaggtggagcttgcagtgagccaagatcgcaccactgcactccagctgggggagagcgtgagactccatctcaaaaaaaaaaaaaaaaaaaaaaagaactgagaataatgccttcttcgcttctacttttcaaaactcatgtgccttcatcttctcatgaacattaactcacaaccataaacagaagggagtcttggatatatagtttccaaccttattagggctgacagtacaatcaagtagaacaagctatacactaactttcatcttcatgtcaaaaggtctttcttcttaatgcagtttgtccaatttccaaccaagatcaaggacagtgaacaagaaaatagggccaggcgtggtggctcatgcctgtaattcagaatatgaccagaaaccagttgagaatgatgtctgtcaagagtcttctataaggactaatgtatctgagttacacacaagtggtatccacaaggaacaaacaaatgtggaagacacattttttttttttttgagatggagtcttgctctgtcacccaggctgaagtgcagtggcgcaatctctgctcactgcaagctccgtctcccgggttcacaccattctcctgcctcagcctccagggtagctgggactacaggcgcctgccaccacgcccagctaatttttttgtatttttagtagagacaaggtttcactgtgttagccaggatggtctcaatctcctgacctcgtgattcgcccgccttggcctcccaaagtgctgggattacaggcatgagacaccgcacccagctggaagacacatctttaaataataaagactgaaggacactgggcatggagactcatgcctgtaatcccagcactttaggaggccaaggcgagaggactgcttgagcccaggagttcgagcctagcttgggcaacatagcaagacactacctctataaaataaaacttttaattaaaaaaaaaatgactgaagggaaaggcagagtgacagcaaattccagtacctgcaatagtggactggaaaagaaataacagtctcatgatcacacactggaaacataatggcaagtgggaatgaggccaggcatggtggctcacacttgtaatcccagcactttgggagcctaaggcggggagatcccctgatgtcaggagttcgagaccagcctggtcaacatggcaaaacccccatatctactaaaaatacaaaaattagctggacatgatggcacgtgcttgtagtcccagctacttgggaggctgaggcaggagaattgcttgaaccagggaggtggaggttgctgtgagccaagatcgtgcctctgcactccagcctgggcaacacagcaagactccatctcaaaaaaaaaaaatggccaggcgctgtggctcacgcctataatcccagcactttgggaggccgaggcgggcggatcacgaggtcaggagatcaagaccatcctggctaacacggtgaaaccccgtctctactgaaaaatagaaaaaattagccgggctattcgggaggctgaggcaggagaatggcatgaacctgggaggcggagcttgcagtgagccgagatggcaccactgcactccagcctgggcagcagagcaagactctgtctcaaaaaaaaaaaaaaaaaaaaaaacaagaaagtaggaatcaaaaacgtttcatctaaactcacaccaacttgtgcatccctgggtccaaaagacatttcaatggaaatgagacagattttatataactacaattatttaaagtcctaaattacaaaatatacatagctgaaagcgtacaaaacaggatatttattaaatgtttatatcacaaacatacactagaaattaatacaaaaggaatcactattaaggctgaggcatgtaaaggcaataccatattaatcataattaagagatttctctcctactctgaatttttaggtacaaaataagtgctataccaggttttcctacatgctctacataaataacgtttctcacatttacaacaaggttttacggttgaacactctcccaggtccactgtattcgtagattcacgctccagcatgtgttctcacatgtgcttgaagcgatgcgagatacctgaaggttttcccacactgcttgcattcatacggtctctctccagtgtgcgttctcacgtgcacacgaagggacgaggaacaactgtaggctttcccacattcagtacattcgtagggtttgaccccactgtgtgatctcacatgcttttgaaagtactgagcgtggctgaaggctttcccacattgattacattcgtacggtttctctccgctgtgggttcgcacatgctctcgaagggaggagtgacagctgaaggctttcccacaatgcttacactcaaagggcttctctccagtatgcgtcctcacgtggattcgaagggaggaggaaaaactgtaggctttcccacactctttacattgatagggcttcaccccgctgtgtgttttcacatgtcttctaaagtaagtgggacatccgaaggccttcccacactgcttgcacacatagggcttctctccggtgtgcattctcatgtgtgctcgcagagaggaggggtacctgaaggctttgccgcattccttacattcatagggtttctctccactgtgcgttctcccatgttctcgaagagacgagtaacaagtgaacgcttttccgcaatgtttacactgacagggtttctctccagtgtgcgtcctcacgtgatctctaaaggaggagtaacagctgaatgattttccacaatgcttacattcatacggtttctctccagtgtgtgttctgacatgttctcgaaagtatgagggacagctgaaggctttcccacactccttacactcatagggtttctctcctgtgtgagttcttacgtgccgtgtaaggtaggagtaatacataaaggtcttcccacatactttacatgcatgggttttctgcccatgatgactattcacatgtcccctgaaagatgagggacaaatgaaagcttttccacatttctgacattcataagactttttactgctgagacttttcacgtatgtcacagatgctgtccttgagtcctggcaattacagggtttctctacagtctgcgttttcataggagggctttggcaggagaggcagctgcaggcttgcccacattccttacacggtctctgtccagtgtgagatctctgccgattctcgaaggctttgccacacttagtgcactcagagggtttagcttcggtagggtaactcttgtgcacaagaaggttcgcagtctggctcaaggtctctccgcattgatgaccttcattactttcacagagtctccccagctgacttctgttcaaaatgggaagcaagctactagtcatgaatgactataagtgattaatttattaatggtttttagtgattattttgattacattatttgccaatttcactgaatggttctattttcagcactgtctgcctggtttctatggagaacaagcttaatgctctagctgaaggctcaactgcagccataaatttcacggtgtttcttttcttctttttttgagatggagtctcgctctgtcacccaggctggagtgcagtggcgccatctcggctcactgcaagctccacctcccaggttcatgccattctcctgcctcagcctcccaagtggctgggattacaggcgcctgccaccacgcctggctaatttttttgtattttagtagagatgaggtttcaccgtgttagccaggatggtcttgatctcctgacctcgtgatccgcctgcctcggcctcccaaagtgctgggattacaggtgtgagccaccacacccagcctttttttttttttttttgagatggagtttcactcttgttgcccaggctggagtgcaatggcatgatctcagctcaccgcaacctccacctcccaggttcaagcgatactcctgcctcagcctcccaagtggctgggattacaggcgtgcaccactacacctggctaattctttttcgtatttttttttttttcagtagagatggggtttctccatgttggtcaggctggtctcgaactcccgacctcaggtgatccacctgcctcagcctcccaaagtgctgggattacaggcgtgagccactgcgcccagcccacggtgtttcttatagatgaagtttcctgatattgtttccaactgtttcagacacgtgacattgacatcacatttataaaaatactctcttaggaaaagtctcagccagggacggtgaatcacacttgtaatcccagcactttgggaggttgagatgggtggactgcttgagtccaggagtttgataccagcctgggcaacacagtgaaactccgtctctacaaaaacacaaaaattagccaggtgcagtggtgtgtgcctatagtcccagctacttgggaggatgaggtgggaggattgcttgagcccaggaggcaaaggttgcagtgagccaagatccgtgccactgcacttcagcctggttgacagagtgagacccccatctcaaaaataaataaataaataaaataaaaataaaataaaataaataaaagtaattattaaaatatatttttaaaaagagaaaataaagaaaaagaaaaaaaatgtctctgtgggtctgaaattgtgtagttggtttatactttttttttgagatggagctttgctcttgttgcccaggctggagtgcaatggtgcgatctcagctcactgcaacctccgcctcctgggttcaagcgattctccttcctcagcctcctgagtagatgggattacaggcatgagccaccacgcccagctaatgttttgtatttttagtagagatggggtttctccgtgttggccaagctggtttcgaactactaacctcaggtgatccacccgcctcggcctcccaaagtgctgggattacaggcgcgagcccctgtgcccagccgatacttttctttgaattgcaagttagtttgatgctctgcggagaggcccatccctccggttgagcgccactcacctcagatgcctctgtgggatttggtgctgatctccagtgttatcaaatctccaattttctccaaaaatagaccaggaatcacttcctgtgaactttacaatctcttcatcattggatattccattcccaaaaacgtccctctgagaacttgatccactggttctaacataaatgtaacaatctgcaacaatcaattacacaatttcttaggagaaatatgttgggataaaggaaatagaccacatacggatttcttttcatatagtaatccaaaaatgtaccgtttataaggaagaatagacatgctatcaaagtgagactctgaggacctcatctacttgagaatttggcaataataaaaagcagatgagccgggtgcagtggctcatgcctgtaatctcaaagcactgcggggccaaggtagaagaattgcttgagcccaggagttcaagacaagcctgggcaacataggaaaataaggagacctcatctctaaacaacaataaaaaatttaaattagccaggcgtggtgttgtgtgcctataatcccagctccttgggaggccaaggagggaggatcacttgagcccaggaggtcaaagctgcagtgggccatgattgcaccacggcactgcagcctgtgtgacagagtgagaccctgtctcaaaaaaagaatagtgctggatgcggtggctcacgcctgtaatccctgcactttgggaggccgaagcgggtggatcacctgaggtcaggagttcgaaaccagcctgaccaacatggttaaaccccatctccactaaaaatacaaaaaatcagccgggcatagtggcacgtgcctgtaatcccagctactcgggaggctgaggcagaagaatcacttgtacctgggaggtgggggttgcattgagccaagatcgcaccattgcactccagcctgggcaatgggcagtaagagtgaaactgtgtctcaaaaaaaaaaaaagaagagataaacgtggcaacccatttactaagaaacagaatagttccaaacagatggagactgatgtttagtaaaatattatcagaaaagcaaagtttgcacatgcacaaatgctcctcgtatacgaggaaatccagaggctttcccctgcgaaggaggacagtgcaggggggtgcaggagaagccacacagggcagctgagagaggacacacctcctcctcctcagagaagggtttgtgtttcttttttttgttttgttttgttttttgagacagagtctcacactgtcaccaagactggagtgcagtggcactttgttggctcactgcaacctccgtgtcctgggttcaagcaattctcctgcctcagcctcccgagtagctgggattacaggcacctgccaccacgcccgactactttttatatttttagtacacatggggtttcaccacgttggccaggctggtcttgaactcctgaccttaggtgaaccacccacctaggccttccaaagtgctgggattacaggcgtgagccactgcgtgcggccaggggtttgtacttctaacccacgatgccaaacggaaccttcttatccagaacccactcctcccgagggctgctgctctcctggtgctcacaggcacagggcccttacaggagtccttcctccactatgcccggctgccctcaggtgtgagcaccacccattcctggagaatcacatgatgaggaaggattgtgaagggcaacaaatgttcccctgagacaggccaacactttgacttcccagaccaccgatgatgtccgagtgtgagttttaattgcagcaaaattaccatgtcaaacgtggattactcacagtgtaacttggatttactttatcacagtgtactttgattttcaaagtacagttactctgtgtggtgaaccacaaagctgcttttgttgccccaacgtgacacagaatactctactcagacttataaaatgtgggcagccaaggactggtgatcaagaaaacctaaatatcaatcatacacaaaactttgttttcatggagaagcattttgactcccatgttccatgggtgttgggatcatgtctatctcttttccaacatatttcaatttttgagctcaaataaaaagaaaaacaaggtatcttaggccgggcgcggtggctcacgcctgtaatcccagcactttgggaggccaaggcgggcggatcacgaggtcaggagatcgagaccatcctggctaacacggtgaaaccccatctctactaaagctacaaaaaattagccaggcgtggtggtgggcacctgtagtcccagctattcaggaggctgaggcaggagaatggcatgaacccgggaggcggagcttgcagtgagccgagatcgtgccactgcactccagcttgggcgagagagcaagactccgtctcaaaaaaataaaaaaaaaaaaaaagaaaaccaaggtctctttgctctccaggacgcagtgagggaatgatgccacccttacccaaggaggcagtgagggaatgacgccatccttacccaaggaggcagtgagggaatgacgccacccttacccaaggaggcagtgagggaatgacgccacccttacccaaggaggcagtgagggaatgacgccacccttacccaaggaggcagtgagggaatgacgccacccttacccaaggaggcagtgagggaatgacgccacccttacccaaggaggcagtgagggaatgacaccacccttacccaaggaggcaaggttcctgcaggtctccagcatcacatctctgtagaggctcctctgagcatgatccagcaatgcccactcttctggggtgaagttcacagccacttcctcaaagatcacgcagtcctaaaacattccacacatcccacttcagcaaaggcaccgcctcccccatgtgcgcaggaagaggggtgaggctgacagcctggggaactgagccacacagagcttatgtccttgtgagaggtgaccaacagtatgaaaaagtgcagtacactcaatgccgtgagtaccttcccaacagggagcaaagcgcaatgacggcctctgccagagacttacaaagaattactgagaaacggcaggtatgagggtggggaaacactgaaaaatctgaaaacatcattaagctaaggctggtggctcatgcctgcaatcccagtactttgagaggctcaggtgcgaggattgcttagggccaggagttggcgaccagcctgggctgcatagtgagatcccgtctctacaaaaaaaataaaatacaataaattaaccagccatggtggtacacacctgtagtcccggctacttaggagggtgaggagggacaatcgcttgagctcgggggttcaaggctgcagtgaactatgactgtgccactgcactcctgtctgggccacagagtgagacccaatctcaaaaaaataaaataaatcaatcattcaggtaacatggaaattgacatgacttgctcaaattttattatttcttattcagctataatatcagcactttgggaggccaaggtgagaagatcgcttgaggccaggagttcaagacgagcctgggtgacagagcaaagaccctgtctcttaaaaaaaaaaattaaattaaattaaattttaaaaatacaactatgaagaaaagcaaggagattatttccttataatttaggatattggccaggtgtggtggttcacgcctgtagttccaacactttgggaggccaagacaggcagatcacttgagttcaggagttcgagatcaccctggacaacacagtgaaaccctgtctctaccaaaaaaaaaaaggctaaaagaatttaggataggccgggcgtggtggctcacgcctataatcctagcattttgggaggctaaggtgggcggatcacaaggttaagagatcaagaccatcctggccaacatggtgaaaccccatctctactaaaaatacaaaaattagctgggcgtggtggcacacgcctgtagtctcagctactcaggaggctgaggcaggagaatcacttgaacccaggaggcagaggttgcagtgagccgagatggcgccattgcactccagtctagcaacagagtgagtctccatcacaaaaaagaaaaaaaaaaaaaaaaaaagaatgtagaatactggcctgatctggagggagaagcctaccattacacatcatttcaaattggatgccaaggcttcttcgaagacatggcctggctgtcgttacacactgttcacttgaggacgtttccactgactctgtaattgtcttacaaaagttctacatgtgttcaattttataataaaatgctatcagcagctgggcttggtggctcaggcctatactcccagcactttgggagactgaggtgggaggactgtttgagcccagaagcttgggaccagcctgagcaatatggtgaaaccctgtctctacaaaaaatacaaaaattagccaggcatggtggggcacacctggagtcccagctactcaggaggctgaggtgggaggatcatttgagcccaggaggttgaggctgtagtgagccacgatgtcaccactgcactccagcgtgggtgacagagagacgccctacctcaaaaaaaaaaaaaaaaaaaaaggctgggtgaggtggctcacacctgtaatctcagcactttgggaggccaaggcgggaggatcacttgaggtcaggagttcatgagcagcctggccaacatggtgaaaccgcaccgctactaaaaatacaaaaattagccaggtgtggtggtgcatgcctgtaatcccagctacttgggaggctgaggcaggaaaatcacttaaacccagaggcagaggttgcagtgagctgagatcaagccactgcactctagcctgggtgacagagtgagactgtctcaaaaaaaaaataaaaataagtaagaacacagccaaatcaccactttcagcccgtgttaaaggacaaaggggtgagtggtggattctagaagatctagaagtttttctgtcccacaaagggtcccatgcagaaaacaggtatcagttaatgattagggtctcatgcagaaaacaggtatcagttaatgattatcctcatgataaattgttcgtcagtcccctaatcggaattgccgcttctctgtactgtgggtcgtatattacagaatgcgcatctgtctgatgcgcagatactaacaggagacggagcagggtcccccactgtcacaaactctgcaccctgcctaagtcagtgctagtttcatgaatgttttcaatccacaccttcgcccacctcacaatatggcatggggctgtgtgtgcgcctttcccctcatcctaatggaagatgcaacgtcttccgagtttgagagttttccacagcagccttctcgggctaagccatggtataacaccaggcagtggcagaaggcaaagaacacatccaagacaatgactgccctcactaaggacaagaaaaaaaaggcaaaaagcatttattcttttttttttttttgagacagggtcttgctccgtctcccaggctggagtgcagtgaaacaatctcagctcgctgcaacctccgcctccccggttcaagcgattctcctgcctcagactcccaagtagctgggattgcaggcacttgccatcacacctggctaattttgatatttttagtagagacggggtttccccatgtcaatcagggtggtcttgaattcctgaccttgtgatccgcccacctcagccactcaaagtgctaggattacaggtgtgagccaccgcgcccggctctttttttttttttttttttttccagacagggtctagctctgttgcccaggctggagtggagtggtacagcctcaaactcgtgggctcaagcgattctcccccctcagcctctcaagtggctgggaccacaggtgcgcatccccatgcccggcctcattattttacatttactaaaacctggggctgaaataggaacaataccaatgctgagctggacacagacgaggctgttcgcagctgtcaggtgacaatgttgaactgacttcagctctgtgctcctggaaaccagcaaaggtgaaaccccgtcctgctgtgctctggaattgggacagccaggaccctcccttcccatacgacttagataagattcacgcagatgacaaggccagattcagaccctccgaaatcccattctttgtcatcagaaatgattcactaggttaggtgtgcccaggctggagtgcagtggtgtgatcatggctcactgcaacctctgcctcccgagttcaagcaattctccctgcctcagccttccaagtagctgggattacaggcacacactaccacgcccggctaatttttgtattttttagtagagatgggatttcaccatgttggccaggctggtcttgaactcctgacctcaggtgatccacctgcctcagcctcccaaagtgctgggagtacaggcatgagccaccgcgccaggcctagccaactcttcagatgcctgcatacttgacggtcacagagctctccccctgcagctgtctccctgtggctacagcattagtcccgcagctcaatcatcaactgtccccatgcccctgttgcttatacccccaccccactgcaatagaacctcaagcctctggcattactctcctgcctctaatccaactaacccttctccctattgcaacagccccttctccccctcccccaatacctcgcaataatcctttttcataaaagtttccttactacgtttgggtttacacaagcttgaccacatgttcgcagcctcccgtttcttccccaaactttactcagccttctgtcctctccgcaggcccctgaactttggcccccccgagtctgagcaagcagtaagtgtggagtcccctgtcacctcccctgagctagctgaccacgaggaggtacatttactgtcaacctcctttctgcttgtcccctaaaacgttcctccaaaccttttcttgtgtatgaaagtaaagccttttcctggttgattttgagacctggcaggtttcggaggctggggcttatccctatttttctctctccttctctagccaggatttttttttttttttttttttttggtttttgtttttgagacggagtctttctctgtcgccaggctggagtgcagcggcgccatgtcggctcactgcaagctccacctcccaggttcacgccattctcctgtctcagcctccctggtagctgggattgcaggcgcccgccaccacgccgggctaatttttgtatttttagtagagacgggatttcgccatgttgtccaggctggtctggaactcctgacctcaggtgatccgcccgcctcggcctcccaaagtgctgggattacaggcgtgagccaccgcgcccggcccaggattttattatttgacaggctccaggacagggcaccacctcctccttggcagaccttcccaaactgaccaccaagcccctgacggctcctgccctctcctcccactctccccgatcccctgactgcctctactgtcccccaacacatccctcgagcccgactccctttactgtccccccaaacttccctcaagcccctgatcgcctctactgccccccttaaagtgcccctgagcccctgactgcttctgctgtcccctcgagctgcccccaaactcccgactgcagctactgtccccctaaactgccttcgagcccctgatcacctgtcccccaaaactgccccttcaaacccatgaccgcctctacggccccctcaaactgtccccgagttcctgaccgctgctattggccccctaatctgcccttgagcctgactcccttccactgaacccccaaactgccgccgagcccctgaccgtgtctgttcccgcaaactgcccctgtgccccttaaacctctactgtccacttaaattgcctcaagcccctgaccacctctgctgtccccacaagctctccccaaactcctgacctgtactgtccccagaaactacccctcgagcccctgaccgcttttgctgtcaccccagactgcccccagccctacccctcggccgctgtgaccacgtccccggggcccaggcgctcgtcgtgcgccgccccgcgcgtccctcagctttctccggctgcgaactcgggcggaagccggttcctgccgccccacctcgccctgggcccgggctcggctcccgcccggcactcaccatgtcccgcccgctcctgggctctccagggttagcgccccgcggtccagcgaccggcgcaggtgagcacgacaggacacctgagccgctcggggtaggcggggaagcgcgcaaggcagaggggaactcggcttaccgtcctcggggtctgattggacagatctcgggaagtggagactctgattggacagtgctgtcgactccgcacccctgattggagaattctccagtccgtccccctagcgcccttgattgggcagggctccgcttcggattaacgtctctgattggacagttccctaggccccgcccctgcctgtcctgattggataattctctcctcagtgacgggctcgtcgagaacacgcgtggctgaccctctagccgggcagccgcggatctgggagaactcactccagtccagggagggcgcggcgtcctcctccctgactgcacggcaactccagactcagtttcccctcggagcggcccctcgtgcggggaggagaggaagggcacggagtcccatggggcggagtcctgcgtgggggcgggacccgcgtgcgtgacgtcaccgtgctgtcccgcgtgggcgcggacgcctggggtccagagacctggagatctggagaccagacgacgaggccccaggaggccggaccccaccaggcgctccctgtgttcttaaaactctcggccgggcgcggtggttcacgccggtaatcccagcaccgtgagaggcggagaccggcggatcatcagaggtcaggagttcaagtccagcctgaccaaaatggcgaaaaccacttctctcctaaaaatacaaaaattagctgggcacggtggcgggcgcctgtaatcccagctactccggaggctgaggcaggagaatcgcttgaacccaggaggcggagattgcagtgagccaagatcaggacactgcactccagcctgggcaacaagagcgaaactgagtctcaaaaaaaaaaaaagcagccctcccacaaacagaaccacgtaaggtcatgaagagagaggtctcacatttatatgcttaataacgaaaaagactctacaaaaaccacaggcttaaacaaaaaatacttttacagggacactcagactggtgtgacccttgttactgatctttgtagacaaggataattatttctgaaaaatgatgtaatcctcatttaaaattttttttttcctttataaacctttgtcccagtctgggcaacatggcaaaaccccatatatacaaaaaatacaaaaattagctgggaataaaggagtgtgcgcctatggtcccaacgacttgataggctgaagcaggaggatcgctcgagcccgtggggattgaggctgcagtgagctgtgatctcaccattgtactccagcctgggcaacagagacccccgtctcaaaaaaatgaaaaccaaaaacaacctttgtcttcctttacctccctgaataagcacatagtttgctatgccgcgcatattcccactgcaatgaactgttaccaccgtttttagacagcctgttatttaggtcgacacagtaaaaacatgaattacgacaattatgtttgtatgtaaaatggcaagcgatatagagtttatacttctactctgtctcaagctggaaagtcttttcggagatgagcagtcgcgttccaggctttaggaattgcggctcaactgaataaaagtattcagaattttcacgtcgagttcaaatttatttaaacttctatgattattttctcaaatgagttaaaataagaattcaattaccataggaacagtacagccttttactttaagaaattctctagggccgggcgcagtggctcacgcctataatcccagcactttgggaggctgaggcaggtggatcacctgaggtcaagagttcgagaccagcctggccaacatggcaaaacccttgtctctactaaaaatataaaaattagccgggcgtggtggcacatgcctgtaatcccaactacttgggaggctgaggcaggagaatcactagagcccgggaggcggggattgcagacccaagatcgcaccactgcactccgcctgggtgacagagcgagactccatctcaaaacaaaaacaaacaaaaaaacgccatttgaacgacacgttttgtttccccccgctttattatttttaaaaagtaccatggtgtacacattgcattacaattgtttttgtggctcaatgaaaaaaataaatcctccacctctcttcatcttaataggtgacttccttactccttacagatgtaagatgatgtaagctgatgtaacaaggtctctctaaatagacagtggacttgtttccaatcttttgctactcaaagcttgtcttatgttgcaccaccatgcctggcagatttttgtattttttggtagagatggggtttcaccatgctggccaagttggtctggaactcctgacctcaagtgatccgcttgcctcagccttcatcaatggatattaatgaagcttaggatactcacattgtgtcaaagataagaggcaaggaaactacaaagaaattggaagtgataggaaacagtggaataactgtcagagaggaagcagtgggaacaaaagacaggaaagaaaaacatgcctattatcagagtccctgaagaagtaaacagtagcacagcttttcaccttacatcattaagaaacacataaataggccgggcgcggtggctcacgcctgtaatcccagcactttgggatgccaaggtgggcagatcacctgaggtccaaagtccgagaccaccctgacaaacatggagaaaccccatctctactaaaaatacaaaaatgagctggacatggtggcaaatgcctggaacccccgctaatcgggaggctgaggcaggagaatcacttgaacccaggaggtggaggttgcagtgagccgagatcatgccactgcactccagcctgggcaacaagatcaaaactctgtctcaaaaaaaaaaaaaaaaaaaggaaaagaaacacataaatactataataaatgtagcaacgtaccttgcagaagatccaaaggttgcttgtggaattgggcaagggaatctaaatttccagagttagtatgcagtggtggagagagggttgtcggaaatctaatgttaagttttaaagcagaggaaacagtgtgacttggtatttgaggtgtgtgcgcgcattttctgttttcctaccagactcttcagttatgtgcaatttcttctgttcacttagtgtttcttagggttgaaactgaacataaacaaatatgaaattcgtgttatactcacattactcaacatatcaggtaatttgtgaagacagagatgtttcctgatcaattgttctagccgactgacagccaatatctacatagaattatttcaaagtcgcagggtgcggtggctcacgtctgtaatcccagcactttgggaggccgagttgggcggatcacaaggtcaggagatcaagaccatcctggctaacatggtgaaaccccgtctctactaaaaatacaaaaaatcagctgggcgtggtggcgagtgcctgtagtcccagctactcggaaggctgaggcaggagaatggcgtgaacccaggaggcggagcttgcgttgagctgagatcacgccattgtactctatcctgggcaacagagcaaaactctgtctcaaaaaaaaaaaaaaaaaaagaattatttcaaagtcaattgagtggctgggggcagtggcttacgcctgtaatcccagcactttgggaggccgaggcaggcgggtcacgaggtcaggagttcaagagtagcctggccaagatggtgaaaccccatctctactaaaaatacaaaaattagctgggtgtggtggcgggcacctgtagtcccagctactcgggagggtgaggcaggagaatcacttgaacccgggaggtggaggctgcagtgagccgagatcacaccactgcactccagcctgggcgacagctcgagactccgtctcaaaaaaaaaaaaaaaagtaaattgaggacactgtaacactctgctcttaaacacctcccaaatgctattttagagaaaaatctgtatttttatctaaaagtccacacttcatattcgcactttagatagttaacaatcattcctttatacctagcccataatcgtatttccttcaattataccccaaatggtctttacagctggtcctccgaagatccaaccccaaaccaggtattgcatcttcttttattttatagtattatatggtcatgttgaatttttcttttgaggtgtagtctatgaatttttgtgtatgtatagcgttaacgggtgaattgcgtccccacaaatccgtaaggtgaaggcctaacccacagtacctcagaaggtatttgaagataggcctttaaagaggcaattcgattaaaatgagattaaggtgggctcaaatccaaaagactggcgtgctattcattgcagggtgttgagcagcaccctagacctcctcatccactggatgccagtcgccccaaccccatccccggttgtgacaaccaagtctgcagacattgtccagtgtcccctgggcgtaaaatttctcctcccctctttgataatcactgctttagactctatttggtcttagagtcttttctctgaagtccatcattttatccgccgtaaccctgctgtcttcacttaaggggtccaagacgtttacaggagggtgataatggtgatgatgagctgccaataataatccacacacagcactatttgacaaatgcaggtaatgttatgtattttacagacctggaaactgaggcacttaggggcttggcaacttgcctaatatcacccgagagctgattaaggcttggggccaggactgggaccccaggatgaagcccagctgagcagaaaacctctgtgcacaggatgcagcaatcaagataataaaaatcaactccgactgagaaagtatctgcctacacattcatcaggctgggaggacagacccagatggtatcagttggaaaattaacagaaaacagtatttttgccaaggacacctttttctgagccatcaatgtcttctagctcgctaaatgccttccttgcccattacaatcatacacagtgattgacattttatcagtaagaataaacttcccttttccggccggagggtctgattttcttggacacagagaatccgtctccatttccaacccaggtgcagggctctgataagcggtttccggacataacaatctacagcggtcttatcttgtggttcccaaggaaacaggtcccggctgcacttcgcagcccagacccgagggtgacccctttacaagcttgctctttgccaaatggaaaccacgcagtatttacatttcacctaaaccccacccttccctccaaatccgatgggttactcaggcctaggatcctcaggcctagggggtcaaaacgccccgcgtccccaaccaagacccctgaagtctagcggggttccactggcctccggagcctcctccctggggcgcggtgccaggacttcgccattaaacgagcccgccccctgcactttgaactctgcccccatcctttgacccaaacccccctacgccccggcatcggagtccccttgcttggcctctgccacgaagatacggggccaggtccagcagtacaaggaggagaaaccgctctcacgggaggcgctgcggccactgagggagacggccgccgcgggtcacagacggatgcttccgtttccggttccggggcggctgggagctgaaaagtgggctagtaatgagcttgggattggtggagcctcaaagataggcgggacgacctacgtcgtccaatcgctgagcaggaaaagctagtttccgccgtctgggagataattggcattgttggcagatccgcccctcgagggcaagtctcgggacagaatcgcgctgtgggcgtggcttgtactggatcctccccggggcgtggctaaaacaagaccgaggtcccgggacgaggttgggggcgtggtctttcgcgcaatcctccaacgcccaattaccctgataaacaataaacgctaaaataagtaataaatgctcatttcctccagccaacacattcctcgtgataacatactcctgcacaaagatattcccattgttgggatttttcttccttgaatgtctgttatttcttccagaaataaggtcatttttatgcatttacatgtggcttttcttattaatgagtgcgttgtgatgttcccttctggccactagatggccacgtagctcacattttcaaattcgcggatattttgttttagttgctttagacataggtgtccaatcttttggcttcactgggacacattggaataattgtcttgggccacacataaaatacaggaacactaactatagctgatgagctaaaacaagacaaaaattgcaaaataatctcataatgttttttttttctttttttttttttttttttgagacggagtctcgctctgtcgcccaggctggagtgcagtggcgcgatctcggctcactgcaagctccgcctcccgggttcaagccattctcctgcctcagcctcccgagtagctgggattacaggcgcccgccaccaagcccggctaattttttgtatttttagtagagacggggtttcaccgtgttagccaggatggtctcgatctcctgacctcgtgatccgactgcctcggcctcccaagtgctgggattacaggcgtaagccaccactcccagccaataatctcataatgttttaagaaagtttacgaatttgtgttgggtgcattcaaagccatcctgggcttcatccggcctgcaggccctgagttggagaacttagctttagagtttagacacaggaaaaatgcaggggtctttgccttccattgtgaggcatcataactaagattaggaggccatcctgacttgtccccttgtgtgacacccagcgggctccgcatcccttgcattcccatgcctgagcacctatctcttttacaaggtaagcagtcctgaaggataccagcagaccgccagatgggttacaaattcctcatatccggtactgccagcgaaagagaacaaaagtcccttattcctgaatcggcttcatcagcttccccaatctccagccaatcaacaccaaaaagcccaagaagctattagctacaaattcctgcctaaggccgggtgtggtggctcacacctgtaatcccagcactttgggaggctgaggcgggtggatccatctaaggtcggaagttcaagaccagcctgaccaacacggtgaaaccctgtctctactaaaaatacaaaacttagctgggcttggtggcacatgcctgtaatcccagctacttgggaggctgaggcaggagaatcgcttgaacccaggaggtggagttgccgtgagccgagatcgtgccattgcactccagcctgggcaacaagagtgaaactccatctcaaaaaaaaaaaaaaaaaaattcctgccttaaaaggggccagggacttcttccaggccccacatgtgcagctagagttaaggtttagctaatagtaaacttttcctcattttattttatttttttgagatggaatcccactctgttgccaacgctggagtacagtggaacaatcaagactcactgcagcctccaagtcctgggtccaagcgattctcctgcctcaaactcctaagtagctgggactaccagcacttgccaacacacctgcctaatttttgtatttttagtagagacggggtttcaccacgttggccaggctggtctcaaacacctgacctcaggtgatctgcccgcctcagcctcccaaagtgtcgggattactttgggattactgtggcgtgagccacagcgccgggccaacattttcctcattttaatagttaaaaaaaaaaaacctgaggctgaggcaggagaaatgcttgagcccgggaggcggaggttgctgtgagccgagatcgtgccactgcactccatcctgtgtgacagagtaagactctcgaaaacaaaaacaaaaacgaaaacaaaacccacccctaggtggagattttgtatgctattgatacatgcaatgtgtgttagagcaggcagatgctgagtccaaccgtaggtccacctttgcacacctgacctcaccggtattttctgactatgtacgtacagcccccaaaaaggaatttatcttaaggcactagctgctgcctctccctgtgaatagtctgctctgcctcttagagagtactttcattttgcaataaatttctttgcttactcacactttggacttgctctcaaattatttgtgcagtgaagccaagaacctgcccagcccaccagcaacagttgtagctgccggacaggttctccctgctcactgcacaaacaaaatcgattcacaaagaccgtggcattgcagtaaaaagagtttagttggcctgaggctggctatgccatgcaggaaacggagtcattactcaaaccaagctccctgaaggctctgtcgcccaggatggagtgtagtgacatgatctcagctcactgcaacctccgcctcccaagttcaggtgattctcctgcctcagcctcctgagtagctgggattagaggcacccgccaccacgcccggctaatttttgtacttttagtagagatgggtttttgccacattggccaagctggtcttgaactcctgacttcaagggatccaccagccttggcctcccaaagtgctgggattacagacgtgagccactgcacccactcaggggttttttgaagatagtttggtggtcaggaggctagggtctaggtgctgctggctagttggggatgggatcatagggatgtggaacacggccctcatgccgtgagtccacttctgggtggaggccacaggatgggccaggggtgtccatctggttgtcagaaatgcaaaagcctggccaggcgcggtggctcacacttgtaatcccagcactttgggaggccgaggcaggaggatcacttgaggccaggagttcgagagcagcctggccaacatggtaaaactccgtctccactaaaaatacaaaaaaaatagctgggcatggtcgtgcatgcctgtaatcccagctactcgggaggctgtggcaggagaatcgcttgaacccggggggcagaggttgcagtgagccgagatcacgtcactgcactccatcctgtgggcaacagagcgagactccggctcaaacaaacaaacaaacaaaaaaaccagagcgactccatcttgaataggggctgggtaaaatgaggctgagacctgctgggccacattcccaggaggtcaggcattcttactcacaggaggagataggaggttggcaggacagtatcacaggacacaggtcacgaagaccctgctgttagaacagaacatggtaaagaagccgccaaatctcaccaaaaccaagatggcgaagaaagtgacctctggttgtcctcattgctcattatatgctaattataatgtattagcatgctaagagacactctcaccagtgccatgaccgttcacaaatgccatggcaatgtccggaagttaccttatatggtctgaaaaggggaggaggctgaggcgggcggatcacctgaggtcgggagttcgagaccagcctgatcaacacggagaaaccccgtctctactaaaaatgcaaaattagccgggcgtgatggcacatgcctgtaatcccagctactcgggaggctgaggcagcagaatcacttgaacctgggaggcggaggttgcagtgagccaagatcgcaccattgcactccagcccaggcaacaagagtgaaactctatctcaaaaaaaaaaaaaaaaaaaaaaaaaaaaagacgtgtgtgtgtgcacacagaaatgtgtgcctattgtctaataaatactcataaagcatcttctatgtcccagactctgttttctgcactgggaaacacagcagtaaacatcacacatatccttctctatatcctttagattccaatagggaaggacagaaagttaaccatgttgataaatagcatgttaatagatatatcccagccgggcacggtgggtcatgcctgtaatcccagcactttgggaggccaaggagggcagatcacctaaggtcaggagttcgaaaccagcctggccaacatggtgaaacaccatctctactaaaaaaaaaaaaaaaaaaaaaatagccaggcaaggtgtcgcatgcctgtaatcccagctactcaggaggctgaaacaggagagttgcttgaactcaggaggtgcaggttgcagtgagagaagatcgtgccactgaactccagcctgggcaacagaacaagactccatccccccataaaaaaagaaaaaatatttgtgaaatgtatacacgcagttgtccctcaatgtctgcaggagattgcaagatccctgcaggtatcaaagtcagtggatgctcaagaccctgatataaaatggtgcagtaaccagacgcggtggctcacgcctatattcctagctctttgggaggccaaggtgggaggattgcttgagctcaggagtttgagaccagcttgtccaacatagtgagacctcatctctacaaaaaatacaaatattaactgggtgtggtagctggggcctgtggtactagctacttgggaggctgaggtgagaggatcacttaagcctgggaggccaaggctgcagtgagctgagatcacaccattgcctcctaccctgggggacagagtgacagcctgtctcaaaaaaataaaataaaaaggcgtggccgggtgcggtggctcatgcctgtaatcccggcactttgggaggccaaggcaggtggatcacctgaggtcaggagttcgagaccagcctggccaacatggtgaaaccccgtctccactaaaaatacaaaaatcagctgggcatggtggcaggcacctgtaatcccagctactcgggaggctgaggcaggagaatcacttgaacccaggaggcagaggttgcagtgagctgaaatcatgccgttgcacttcagcctgggcgacaagagcaagactccgtcttaaacaaaataaataaattaattaaaataaaataaaatggtgccgtatttgtgtaaaacctccacacaccctcccatatactgtagatcagttctaagttgcttataataactagtgcaacatcaacgctatgtaaatagttgttatactgtattttaaactttgcattatttttcttcttgtattgttaattttattgtttttattaaaatgctttcttcttcttttctctccattttttttttaaatgttttgttttgagacagggtcttgccctgtcacccaggctggagtgcagtggtgggatggcggttcaccgcagcctcgaactcctgggctcaagcaatcctcctgcctcagcctccagagtagctgggaccgcaggtgcagccaccacgcctggcttcaaatattttcgattctgctgaatccacgggtatggaaccagcaaatacagaattcgaggacaagaaacccgcagataacgagaatcaattatactaattgtatctagaatatataatgacgtcaatggaaaaattgcatgaccaccagagggcacacttttacacccaaaacgtcccactttgctgtttgtttttttgtgggttttgttttgttttgttttgttttgttttgttttgttttgtttgagacggagtttcgctcttgttgcccaggctggagtgcaatggtgtgatcgatctgatctcggctcaccgcagcttctgtctcccgggttcaagcaattctcctgcctcagcctcccaagtagctgggattacaggcatgcgccaccacgcctggctaattttgtattttagcagagacggggtttctccatgttggtcaggctggtctcgaactctcaacctcaggtgatccgcccgcctcggcctcctaaagtgctgggattacaggtgtgagccaccgcacccagcccaccactttgctgttctttggaaatgttcacagaaggcaaacaatgctgtttgctctgagttaagggggagaatatgcatatattaaatacgcatgtccatacacacacagagaaggataaagcaacagaaggcacaaaaatagcatgggggaagcgcggggaaagatgcgttcaggggttcttggtactattcttccaacttttctgtaagtttgaagttatatcaaagtaaaaagttgggctgggtgcagtaggtcacacctgtaatgccagtactttgggaggctggggcaggaggatcgattgagcccaggagtttgagatctgcctgggcaacatagccagaccccatctctacaaaaaaatatgaaaattagcaagtgtggcagcagtacctgcagcctcatagctcactaaagccttgacctcatgggctcaagtgatcctcctacctcagcctcctgagaagttgggactacaggcacacgccatcacacccagctaatttttctttttattcttttcttttcttttcttttttgtgagatggagtcttgctctgtcgcccaggctggagtgcagtggcgtgatcttggcttactgcaacctccgcctcccaggttcaagcagttctctgcctcagcctcctgagtagctgggattgcaggcacgtgccaccacgctcagctaatttttgtatttttagtagagacggggtttcaccatcttggccaggctggtcttgaactcctgacctcctgatccacccgcctcggcttcccaaagtattgggattacaggtgtgagccacggtgcccagccacgcctggctaatttttcaattttcttacatgttgtccaggctggtctcaaactcttggtctcaagtgatcctcctgccttggcctcccaaagtgccaggtgcaggaaccactgcgcctcgccctttcaggaatttgagaatagtctgttggcagttgaagacgggtcatccaaaacaaagttgctaacctgaatcacccagaagctctttgctttttgtatttaatcctggatgttattcttaaatttatcgtggtaaaagcattgtaattggacaatgacagggaaaattcattcatttagctccaaatgaccattgcttgcaatctgcagacaatgtatccgtttatttttcttttctggtttctaacgctattggtattctcatcataacatggttttcttacatttctattagcttgtctctttttttcactgaaattgttattgagataattgtagaatcatatgcagttctaagaaataacacagacattggccgggcacggtggctcactcctgtaatctcagcactttggggagctgaggcaggtggatcacctgaggtcaggagtttgagagcagcctggccaacatggcaaaaccctgtctctacaaaaaatacaaaaaaaaaaaaaaaattagccaggcgtggtggcgggcgcctgtaatgccagctactcaggaggctgaggcaggagaattgcttgaacctgggaggcgaagtttgcagtgagcagagatcatgccactacactccagcctggaggacagagcgagactcagtctcaaataataataataataaataataatgataaaaatacagacagatcttttcttttttttttttgaaacagagtcttgctgtacagacatcttttctatacttggcctagattcctccaatggtgacatttggaaaactaaagtacattaccacatccctgatattgacgctgttaaaatctatccatcttcttcccatggccccattttacttgtgtgtgtgtgtgtgtgtgtgtgtgtgtctgtgtgtgtgtgtgtgaagttaacctgggtaagtctgtgtatccatcacagtcaaggtacagaactttgtccgcaccacaaggatgtccccttggatccttctacaatcacacccacctccctctaacgctcccatcccccaaacccatcaggaagctccctaaaaagatgttagtctcctagggatcccccaggttctactccccagtctgctgagctagaagcccaacgctggggtcagaaatccgcatacttaataagatgcccaactgactccagggctgaagataggattggtgcaaaaattgagcccggctgggtgcagtggttcatgcctataatctcagcactttggaaggctgaggtgggaggatctcttgagcccagaaggcggaggtcgcagtgagttatgattgcaccactgcactccagcctccacaacacagcaacagagcaagatcctgtgtcaaaaaaaaaaggaagaaaagaaaaaagaaagaaggaaggaaggaaaaagaaataaaagaaagaaagaaggaaaggaaggaaggaaggaagggagggagggagggagggaggcaggcaggcaggcaggcaggcaagcaagcaagcaagcaggccagacgcgataactcacacctgtaatcccagcactttcggaggccgaggcagacggatcacctgaggtcaggagttcaagaccagcctggccaacatggtgaaacccatctctactaaaaatacaaaaattagctgggtgtggtggcgagtgcctgtaatcccagctactcagggggctgaggcaggagaatcacttgatcccaggaggcagaggttgcagtgagctgagatagtgccactgcactccagcctgggtgacaagagcgagactctgtagaaagaaagaaaggaaaagaaaagatcccaagggcccttcaaaagccattccaaagatttcagttttgcctctgagtgagtggggccataggatgagtatcagcagaggagggacgggatcttacctaactttttttttgagtctctacaaaaaatacaaaaattaggggagcatggtggtacacacctgttgttccagctacttgggcagggctgaggcaggaggactgcttgaacctgggaggttgaggctgcagtgagctatgatcgtgccactgcactccagcctgggcaacagagcaagaccctgtctcaaataagaagacagagagcgggcagcgagatggggggcagggtgggggtgtagcaaagctccgtcctctattattgcatggaatcaaaaatcaccattgcaaatccaaaaatagaacgctgagctttagtttttttttttttttttttttttttttttttagacaaggtctcgctctgtaacccaggctggagtgcagtgacacaatcttggctcactgcaacctcagcctcccagtttcaagagattgtcctgcctcagcctgttgactacctgggattacaggcatgcgcgaccatgcccggctaatttttgttttgtttcgttttgagatggagtcttgctcttgtcacccaagttggaatgcagtggcacgatctcggctcactgcaacctccgactcccgggttcaagcaattttcctgcctcagcctcccgagtagctgggattagaggtgcgcgccatcactcccggctaatttttttatttttagtagagacggggtttcgccatgttggccaggctggtctcgaactcctgacctcagatgatccgcctgcctccgcctcccaaagtgctgggattacaggcgtgagccaccgtgcccggccctaatttttatatttttagtaaaggtgggtttcaccgtgttggccaggctgatcaccatgttggccactcctgggctcaagtgatcctcctgcctcagccacccaaagtgctgggattacaggcgagagtcaccgtgcccggcctgagctttagtattgagagtagcagttcttggccgggcgcggtggctcacgcctgtaatcccagcactttgggtggctgaggcgggcggatcatgagctcaggagatctagaccatcctggctaacacggtgaaaccccgtctctactaaaaacataaaaaaattagccgagcctggtggcgggcgcctgtagtcccagctacttgggaggctgaggcaggagaatggcgtgaacccgggaggcggagcttgcagtgagccgagatcgcgccactgcactccagcctgggagacagcgagactccgtctcaaaaaaaaaaaaaaaaagagagtagcggttctcaaaccgtggttccctgagtggcggcagcagcattgtcacctgggagcttgctaggaatgcacgttttcaggccccaggcccagatttgctgcctgaaaaagtcttaggttgggggtccacaatctgagttttaacaccccccgccccaggtaattgtgatgcacactcaaatttaagaaccactgacttaaagatatgaaagtctttgggaggctgaggtgggaggatcgcttgaggccaggagttcaaggccactctgagcaacacagcgagaccccatctttgcaaaaagagaaacaaaaacagaagaggccggccgtggtggctcatgcctgtcatcccagcactttgggaggccgagacgggcggatcaggagttcgagaccagcctgaccaacatggtgaaaccctgtctctactaaaaatacaaaaattatccgggcatggtggcgcctgtctgtaatcccagctgctcaggaggctgaggcaggagaattacttgaacccgggatgcggaggttgcagtgagccaagatcgcaccactgcactccagcctgggcgacagagcgagacttcgtctgaaaacaacaacaaacagacaagaggaacattcttctgatgagggaaatttccttctttctttctttctttttttgatacggattctgtcgcccaggctggagtgcagtggcgccatctcagctcattgcaagctccgcctcctgggttcacgccattctcctgccccagcctcccgagtagctgggactacaggcgcccgccaccacacccggcttatttttttgtatttttagtagagacgggggtttcaccctgttagccgggatggccttgatctcctgacctcgtgatccgcccgcctcgatctcccaaagtgctgagattccaggcgtgagccaccacacccggcctagtgatggaaattttctaaaattggattgtggttatggttgtgcagttggacacatttgctaaaagtcattgaacaatatgctttaaatgtatgacgtcatcttatgtaaattacgtcaacgaagcgctcatataacatttgacctgtagggggtagcagagaccataagttcaattcagaacagcccctccctgccttgagagtctcaatgggatgaacccatccctttcacttaggagtcctgattggaatgaagaattgggcagctgggaatttcccctcaatagcctaaaatgccttgtttaactaactgtggccacactcagttctaaatttataccaattagctgggggagttgagtctcttgaccacggaaccaggagaagccacatcccctctccaagcccggaagagatggttctcttcttttttttttttttttttaaatggagtctcactccatcgcccaggttggagtacagtggcatgatctcggctcactgcagcctccgcctcctgggttcaagaaattctcctgtctcagcctcccgagtggctgggactacaggtgcccaccaccacgcccagctaatttttgtatttttagtagagacagggtttcaccttgttggtcaggctgggcttgaattcctgaccttaggtgatccacccgcctcagcctcccaaagtgctgggatgacaggcgtgagccaccgcgcctggccttctttttttttttttttttttgagacagagtctccctctgtcacccaggctggagtgtggtggtgcaatcttggctcactgcaacctccaccttccaagtccaagcgattctcctgcctcagcctcccaaggagcttggattactgacatgcaccaccatgcctggctcatttttgtatttttagtagagatggggtttcaccatgttggccaggctggtctcgaaattccgacctcaggtgatttgcaagcgtcagcctcccaaagtgctgggattacaggcttgagccactgcacctggcccgaggggatggttcttaaagggtaaaatgtaaactacgatccacagcttgaccttcaaaagactccaatcctttactttctttttttgttttttatttatttattttttgtagagatgggatcttgctatgttgcccagctggtctcgaactcctaggctcaagcaagcctcctgccacagcctccagagtagctgggactgagggtgtgagctaccataactggccttgatgggaaccagtgtccagaggaagtgcagggccccatcaggcccaggcatgccataggggcaaagctagcgtggaccctcgcaactgagacatccaaggaaagcagacaccaaaaaacatgcatgtgggtgggttaaagtgctccccactctggccaggcacggtggctcactcctgtaatcccagcactttgggaggctgaggcgggtggatcacttgaggtcaggagttcaagcacaggctggccaacatggtgaaaccctgtctctactaaaaatacaaaaattagccgggcatggtggcgcgcacctgtaatcccagctactcaggaggctgaggcagggcaattgcttgaacctgggagacggagactgcagtgagccgagatcacgccactgaactccagcttgggcgacagagcgagactccatcttaaaaaaaaaaaaaagttctccccactcagtcatctccttctagcaataatttacagagcccgtccaggacagacaaggaagaatgaaacaaacaagaaaatatcacagggtggtgggacgattaggaaaactcgggaaagatggagtgatttaaatcagagaagtgtctgctgggtgcgatggttcacacctgtaatcccagcactttgggaggctgaggcagggggatcacctgaggtcaggagtttgagaccagcctggccaacatggcaaaaccccatctctactaaaaaaaaaagtagactgggcgtgatggctcatgcctgtaatcccagcacttagggaggccgaggcaggcggatcatgaggtcaggagatcgagaccatcctggctaacacggtgaaaccccgtctctactaaaaatacaaaaaaaaaaaaaaattagccgggcatggtggcaggtgcctgtagtcccagctacttgggaggctgaggcaggagaatggcgtgaatccaggaggcggagcttgcagtgagccgagattgcgccactgcactccagcctgggcgacagagcgagactccatctcaaaaacaaaactaaacaaaacaaaaattagctgggcatgatagtgcgcccctgtaatctcagctactcaggaggctgaggcaggataatcacttgaacccaggaggcagaggttgcagtgagccaagatcacaccactgcgctccagcctgggcaaaagagagagaccctgggtctcaaaataaataaataaataaataaataaatacaataagagaaacatcactgagaagagatttgttaattgaattctggatgacagagggtgttcgattgaagaggggataaagaaagactcaaacacccaggagttcgagaccagcttgtgcaatatagggagaccctgtctctgcaaaaacaaacaaaaattacctgggcgtggtggcaggggactgtagttccagttacgcaggaggctgaggccagaggatcgctcgggcctggaagtttgaggctgcagttagctgtgatcaccctactgcacttagcctgtgagtctcagtccctgtctcaaaaaaaaaaaaaaaaatagaggcttgaacatgaataattattcatcagtgaccctatgttgaaccaacaaagctgccccctgattctggaccatcagaaactgtgagataataaatgttgattgtttcaacaattcgtgtaaatggcccagcaagtttaggggcaatttgttacacagcaatagctaactaatgtctctggatttcttttgagaggaaagccaggtccaggagattcaaaacccacttcttttttttttttttttttttttgaggtggagtctcactctgtcacccgggctggagtacagtggtgggagctcggctcactgcagcctccgcctcccgggttcaagtgattctcctgcctcagcctcccgagtaggtgggattacaagtgcgcgccactacacccagctagttttttcatttttagtagagacgaggttccatcatgttgactcagctggtcttgaaatcctgacctcaggtgatccgcccacctcggcctcccaaagtgctgggattacaggcgtgagccaccgtgcctggccctcaaaacccacttttggagtggatgtggatgccccttcctccaagcttgggttcatgaggaggtccagtctaatgccactacctgagcagatcctaactggatctctctatgatggcgtaagggttatgggaatacctcctggagcaagactgcctgggataaaatcctagtttacttagcaactgtgtggtcctaagtaggtcacttagcttctctgggacttaatttcctcctatgtaaaatgggatttagtggttgatgaaaacattgagttgttatagttactcatatgaaagtcgtcagaatcaggctgggtgcggtggctcacacctgtcatcccagcactttgggaggtcgaggcgggtggatcatgaggtcaagagatcgagaccatcctaacacggtgaaacccgtctctattaaaaatacaaaaattagccaggtgtggtgaagtgcacccgtagtcccagctacttgcgaggctgaggcaggagaatcgcttgaacccggcaggcggaggttgcagtgagccgagatcatgccattgcactccagcctggaagacagagcgagactccgtatgaaagaaaaaaaaaaaaaagaaagttgtcagaatcaaaatggagtgacttgtgttaaaaaaaaaaaaaaaaaaaaaaaaaaaggccgggcgcggtggctcacgcctgtaatctcaacacattgggaggccgaggcaggcggatcacaaggtcaggagatcaagaccatcctggctaacacggtgaaaccccatctctactaaaaatacaaaaaattagccgggcgtggcagcgggcacctgttgtcccagctactggggggctgaggcaggagaatggtgtgaacccgggaggcggagcttgcagtgagccgagattgtgccactgcattccagctggggcgacgaaacgagactccgtctcaaaaaaaaaaaaaaaaagtgacgccaggtgcagtggctcatgcctgtaatcctagcacttcgggcggcagagattggcagattgcctgagctcaggagttcaagaccagcctgggcaacatggtgaaatccagtctctactaaactacaaaaaaaatcagctgggcgtggtgacgggtgtctataattccagctacacaggagactgaggcatgagaattacttgaacccaggaggcagaggttgcagtgatccgagatcgcgccactgtactccagcccgggtgacaaggtgaaactctgtctaaaaacaaaaaaacaacaacaacagcaaagtgacaaatagagccagggacagctttgaatagtgcgttctcatgcatggatgcctgataacaagaaaatatcacaaaagactgcatgccgggcacggggctcacacctgtaatcccagcactttgggaggccgagacaggaggatcacttgagcctaggagtttgaggccagccggagcaacacagccagactctgcctctacaaaacaataaaaaataaaaaatagccaggcgtggtggcacatgcctgtagtcccagctactcagaaggctaaggtgggaggatgacttaagcctcgtaggttgaggcaacagtgagccatgatggggccactgcactccaacctgagcaatagcatgagaccctgtctcaaaaaaataaaagaaaaaaataaaaggctgcaaaccccaaaaatttgcatcaaacttccttttttctttttgttttttgagatggagtctcgctctgtcacccaggctagagtgcagtggcgcaatcttggctcactgcaagctccgtctgccactctcctgcctcagcctcccgagtagctgggactacaggcacccgccaccatgccggctgattttttttttttttttggagatggagtctcgctctgttgcccaggctggagtgcagtggcaggatctcggctcactgcaagctctgcctcctgggttcacgccattctcctgcctcagcctcctgagtagttgggactacaggcgcccaccaccacgcccggctaattttttttgtatttttagtagagacagggtttcaccgtgttagccaggatggtctcgatctcctgacctcgtgatccgcccacctcggcctcccaaagtgctgtgattaaaggtgtgagccaccgcgcccagccctgattttttaaatttttagtagagacggggtttcactgtgttagccaggatggtctggatctcctgacctcgtgatccgcctgcctcagcctctcaaagtgctgggattacaggcgtaaaccaccacgcctggccgcatcaaacttcccgtcacaaccttattctacaggacatcttttcaacaagaccagctttatccttgttttttgtttgtttgtttgtttgagacagggtctcactctgtcgtccaggctggagtgcagtggtgtgatctcagctcactgcaacctccgcctcctgggttcaagtgattcttgtgcttcagcctcccaagtagctaggattacaggcaggcgccagcatgcccggttaatttttgtatttttagcagagatggggtttctccatgttggccaggctgatcttgaactcctggcctcaggtgatctgcccacctcaacctcccaaagtgctgggattacacgcgtcagccaccgtgcctggcctaccgttgttattgatccttgtagcgaaggataattacctcaaaatagttacgtcatcttcctcaattctcctttagaaatctttgtcttctattacctccctcagtatgtgcatagcttacttactatagcactgcaaagccctatttccaaataaatatccttttgttttagagagcttctccttgtttgttatttaggttgacagtttcttttttgagccttgtagtgggtagaactttgtcccccaaaaatatctgttgaagtccaaaagccccctccatcccctgtacctgggaatgcgaccttatttggaaatagggtcattgcagatatgattagttatggccgaatgcagtggctcactcctgtactcccagcactttgggaggccaaggtgggtggatcacgtgaggccaggagcttgagaccagactgggcaacacgccaacactcccctcggcaaaaaaatacaaaaattagacgggcatggtggcacacacctggagtcccagcactttgggaggccaacgcaggcagaccacaagggcaacagatggagaccatcctggccaacagagtgaaaccccatctctactaaaaatacaaaaattagttgggcgtggtggtggcgggcgcctgtagtcccagctactggggaggttgaggcaggagaatcgcttgaacctgggaggcggaggttgcagcgagccgagatcacatcgctgcactccagcctggcgacagagcaagactccgagtcaaaaaaaaaaaaaagattagttaagatgaggtcacattggattaagacagcttctaaatctgttgtttttttgttgttgttgttgttgttttttgttttttttgagacagggtctcactccctcacccaggctggagtgcagtggcgccacctcggctcactgcaacctccgcctcccgggttcaagcgattctcaaggcagctcctaaatctaataattggcgttcttatcaggagagggaaatttggacacagacacagagacaaacagggaagaaagccaagcagtgatggaagcagaaattggagtgaagccaagtcacaccaaagcctgctggccgccaccagaaactggaagaggcagggaggaccctcccctggagccttcagagggagcacagtggccctccccacacctcgattctggcctccgtcactgtgcgaaaatacatttctgttgtctgaagccacctggtttgcagtcatctgttacagcagctacagaaaacaaatatcagcttctttctaccaggtggcaggaggcaaacctcatcaatcctagccacttccacaaactcactcttcctgtgacagggggttggtgtggagcctgagggtgggggtgaagctgtcctcacagggttaacaagaattctgtacagattggccgggagcggtggctcacgcctgtaatcccagcactttgggaggccgaggcgggtggatcacaaggtcaggagttcgagaccagcctggccaagatggtgaaaccccgtttctactaaaaataaaaaaaaattagccaggcgtggtggcaggcgcctgtagtcccagctacttaggaggctgaggcaggagaattccttgaacctgggaggtggaggttgcagtgagccgagattgtgccaatgcactctagcctgggtgacagagcgagactccatctcaaaaaaaaaaaaaaaaaaagaattatgtacagacatatagttataattaagcattaggctgggcctggtggctcacgcctgtaatcttagcactttgggaggccgaggcaggtggatcacctgaggtcaggagttcgagaccaccctgaccaacatggtgaaaccctgtctttactaaaaggacaaaaaattagccgggcgtggtggcgggcgcctgtaatcccagctactagggaggctgatgcaggagaattgcttgaacccgggaggtggaggttgcagtgagtcgagactgcaccactgcactccagcctgggcaaaaagagcgaaactccatctcaaaaaataaaaaattaaaattaaaatgaagcattaatctggctgcactctgacctgcttccttgtaacagaaaagcacattgcactagacactgaccatttgcaccacatagataccatctctgacgttagaagcaaaatacttctgtttaagaattgcttaagcaggccaggctcattcctgtaatgccaacaatttgggaggccctggcaggaggattgcttgagcccagctgtataagactggcttgggcaacatagccagacctcatctctacagaaaatttaaaaattagccaggcatggtggtgtacgcctgtagtcccagctactcaaaaggctgaggtgggaggatcgcttgaacccaggaggtcacagctgagtgagctatgattgcaccactgcactccaaccagagcaatagagcaagactccatctctaaaaaaacaagaacagggccaggcatggtggcctgcggctgtaatcctagcattctgggaggccgaggtgggtggatcggatcacctgaggtcaggagctggagaccagcctgcccaacatgggaaaaccccgtccctacttaaaatacaaaaattagctgggcgtggtggcgggcacctgcaatcccagctacttgagaggctgaaacaggagagtcgcttgaaaccgggagacaaaaggttgcagtaagccgagatggcgccactgcactccagcctgggtgacagagcgagactccgtctcaaaaaaaaaaaaaaaaaaaaaaagccagggatggtggctcacgcctgtaatcccagcactttgggaagctgaggcagacagatcacctgaggtcaggagttcgagaccagcctggccaacatggtgagactcccccccaccaactaaaaatacaaaaattagccgggcatggtggcaagtgcctataatcccagctactcgggaggctgaggcaggagaattgcttgaacctgggaggcagaggttgcagtgagatgagatcatgccgctacactccagcctgggggacagaatgaaactctgtctgaaacatacaaacgaacaaaaaaagttttggagtgtggcgcctgttgactggttgaagagtgcagggtgaagttctgggacgggggagggagaagctatgttctcatgctcatcctgctcctctctgggggccttcacactagctggtgtcagctgttctgctggaattcaggatctactcaagcaattctcttttttctttctttctttcccaggctggagtgcagtggcacaatcttggctcactgcaacccctgcctcccgggttcaagagattctcctgcctcaggctcctgagtagctgggattacaggcatttgccaccgtgccccgctaatttttgagtttttagtagaggtggggtttcatcatattggccagactggtctcaaactcctgacctcaggtgatccacccgcctcagcctcccgaagtgctgggattataggcatgggtcactgcgcctggccgcaattcttttttcgacacagggtcttgctctgttgcccaggctggagtgcagtggtacagtctcggttcagagcaggctcaacttcccaggctcaagtgatcctcccacctcagcctcccgagcaactgggacgacaggtgtgtgccaccgtgcctggctaattttttattttttatagaaatggggtctcactttgttgcccaggctggtcttgaagtcctaggctcaagcgatcgtcctgccttggccttccaaagtgctggcattgcagacatgaaccacggcacccagcaaggtagtttgcttgtgtaaaacaaaaactccaaagtatttggaatgcaaatgccttttgtctcaaaccttctagactttgagtttccaagtcaaccaaacaactcaaaagccaagaacaaggaggaaatattggcttccttccttcctgtctgctgtgtcatctgtctcctccctgaggggtcaagggaaattgctccctgctggctgggctggagtggccagggcacagccaaagggaaggacccagggtgaccacactccagggaattccctccaaccccactcacgggggttttaaatcagggagaaatgggccacgctggtggctcacgcctgtaatcccagcactttgggaggccaaggtgggcagatcacaaggtcaggagttcgagaccagcctgaccaacatggtgaaaccctgtctctactaaaaatacaaaaccctgtctctactaaaaatacaaaaattagctgggcatggtggcgcacacctgtaatcccagctactcaggaggctgaggcagaaggattgcttgaacctgggaggcagagggtgcagtgagccaagatcacaccactgcaccccagcctgggtgatagagcgagactccatctcggaaaaaaaaaaaaaaaaaaggcagggggaaacagaatggaccagtctctgtggctcacccctgtaatcccagcactttaggagactgaggcaggagaatcgcttgagcccaggagttcaaaaccagcctgggcaacacaggaagaccttgtccctacaaaatacaaaaatgagctgggtgtgctgggtggcaagcacctgtggtcccacctatttgggaggctgagacgggaggactgcttgagcccaggaggttgggactgcagggagccaagattgtgccaccgcactccagcctgagcaagagtgagatcctgtctcaaaaaaaaaaaaaaaaaaaaaggctcaggcctgtaatctcaacactttgggagaacgaggtgggggtggatcccctgaagtcaggagttcgagaccagcctggccaacatgatgaaaccctgtctctactaaaaatacaaaaattagccgagtgtggtggcacgtgcctgtaataccagccactcaggaggctgaggcagaagaatcgcttgaacccgggaggtggaggttgcagtgagctgaggttgcaccattgcactcctgcctgagcaacagagtgagaccccttctcaaaaaaaaaaaagagtagaaatggaatgactactgaaaatgtgcttccgatttctacatggaccctggaggaatttctctttcctaggagcctccaatcagtgctgtccactgggactttctgtgatgacagaatgttctagatcttcgctgtccagtacggtgacccccagacgccagtgacgactgagcgcctgacatgcgggcagggtgcctgaggaatggaattttaaattgtatttcattttaattaattttaacttaaatagccacatgtgcttactggataccctgtgagacaaccctgtgagtcttggataaagcaacgtgcccagctgaaagtctacaatcagagggaggggaaaaagcaaagcccatattaggaggctggaccataaataaaacacactttaattatgcagctgggtgcagtggctcacgcctgtaatcccagcactttaggaggccgagatgagtggatcacttgaggtcaggagtttgagaccatcctggccaacatggtgaaactccatctctactaaaaatacaacattagctggaggtggtgtggtggcgggcgcctgtcatccaagctactcaggaggctgaggtagaagaatcgcttgaacccaggaggcaaaggttgcagtgagccaagatcgtgccactgcactccagcctgggcgacagagcaagactctgtcacaaaaaaataataataatagccaggcgtggtggctcacacctgtaatcccagcactttgggagaccaaggcaggtggatcacaagatcaggagtttgagaccgatccggccaatatggtgaaactccatctctattaaaaatacaaaaattaggcgggtgtggtggcgggcgcctgtagtcccagctacttgggaggctgaggcaggagaatcgcttgaacctgggaggtggaggatgcagtgagacaagatcgcgccactgcactccagcctgagggacagagagagactctgtctcaaaaaaataagtaataaaaattaaaaaataataattatgggacagtggagggttcgtgggtgggaagcttttctgcaggtctttcatgacggcccctccctttgttctccatggaccagctgcaaaacccaagtcacgtgtgcacatcaccacctctgggggctacttgtcccagcattgaaaccctcagttccccgcagcgagagagcacagaacagaaaacagggaagagtttctctggctgggtttggatctgaagtcagcagacctatcgggcatttgtgtcacatggggaggtcagaggatgggaggcgtctctgtaggagaatcctgacagcattctctgcatttagaacatgcagggcttagagctatcgtgggaggctcccgccacaggagccactgagattacaagattagctgcaatccaaaccacattcggaaaaaaataaaataagaaagggagatacaggcccggtggcggcacagtggctcatgcctgtaatccatagtactttgggaggtggaggtgggaggatcacttggggtcaggagttcaagaccagccggggcaatgtactgagactcccctccccctcgccctgtgtttaaaaaaaaaaagaggaaataaagggaaatatagggaagggaagggagggttgggaggtctcttcaatgagatccttccttccttccttccttccctccctccctcccttctttttttttttttgagatggagtttcactcttgttgcccaggctagagtgcaatggcacgatcctggctgactgcaacctccacctcccgggttcaagcgattctcctgcatcagcctcccaagtagctgggattacaggcgtctgccaccacactcagctgacctttgtatttttagtagagatggggttttgccatgttggccaggctggtcatgaactcttttcttcttttgaggcagagtactctgtcgcccagggtggagtgcaatggcgacatcttggctcattgcaacctctgcctcccaggttcaagtagctgggattacagatgtgcatcaccgtgcccggctgatttttgtatttttagtagaggtagggtttcagcatgttggccaggctggtctggaactcctgacctcaagtgatctcctgcttcggcctctcaaagtgctggaattacaggcgtgagccaccacgcctggcctgatgtggtgattttttttttttttttctgagacagagtcttgctgtgtcaccctggctgaagtgcagtggcacaatctcgactcactgcaacctccgcctcccaggttcaagtgattcttctgcctaagcctccagagtagctgggactacaggtgcctatcaccatgcctggctaatttttgtattttagtagagctggggttttctttttttttttttttttttgagacagagtcttgttctgtcgcccagtctggagtgcagtggcgcaatcttggctcactgcaagctccgcctcccgggttcacgccattctcccgcctcagcctcctcagtagctgggattacaggcacccaccgccacgcccggctaatttttttgtattttttattagagatggggtttcaccgtgttagccaggatggtctcgatctcctgacctcgtgatccacccgcctcggcctcccaaagttctgggattacaggtgtgacccggccaagctggggtttcaccatgttggccaggctggtctcgaacccctgacctcagatgatccacccacctctgcctcccaaagtgctgggattacaggcgtgcaccacagcacctggcccaacgtggtgatttctaagtagggagctgagggagtaaggagccagccggtggctgtctgagagagactgtccctggcagagtgaactgctaatgccagtaccaggtcctgggccaaacagaaagaaacgggctctcactccagaactgcagcttgaccactatatatataatatatatactttatatatattatagctatatatttttttgagatggagtcttgctctgttgctcagactggagtgcagtggcacgatcatagctcactccagactcaacctcctgggcttacgccatcctcctgcctcagcctccccagtagctgagactacaggtgcatgaccaccacacttggctaatttttaaattttttgtagagacgcggtgtcactgtgttgcccaggctggtctccaactcctggcctcaagcaatcctcccacctcagccttccaaaatgctgggatcacaggtgtgagccatggtgacttggcttcatattttgaataggccaaaacaaaactccgaaatccccttactcctatccccacgaccccacacagcaggtttctctcgctctgcagcaacccacttacctctcggaaatcatcccaggcctgttcggagtgcacgcagccccgttagcctccctggctgctcctgtaaccagcccagctctgcctgagaggttccgctattccctccgtctggaatacccaccactctctcccaccccgcgcttgcatccggcaatactgtatcagcctcagggcctctgctgtcccgctttctgctctcagagcctttgtcactgggctggaagagcagttgggaaaattcggtgataaatgcatagcccggggctgggaccatcaaggggacccagtaagttggctccagaaagaggacttgaagcttcgtttgcattgcacgttatttaatattgaggaaaatgtaattagcccgtatctaagaattggggtgacagcgctaaagattgaacccacccacctcccactcctcacctccagccataagccacttccggacaaggctaaaaatgcgtaaaacaatgcaactactcgccacctatccctgcccaagttccagcctctgagcctcaagccccacgccctcctaaatatccccgcccccgctgggaccccaaattgcctatagctctgcaagtccgcccttcccggcagcgggaccgaaagggtaaagcagaggctcccggctcgctgagtgacagcatggccggcggccggggagagccgaccaatcagggagggcgtacgcgacccacgtgcgtaaacggcctcgctattggccggcgccgccagaggcctgccccccccggagcccgaacccacgtgcagctactgcgccttcattgatctgcttcgcggtccaggtggcggctgggtggggcctgggcgggacggggcggggacaaggcgggacgaggcggggcccgatgggtcaaatggcccccggtgggggaaggaggagtttcctcttggcctgaacttggctgacctccgcagcttccgcccggtgagggacgtgagttgccaggcgtgttctagggggctggggggactccaggattcccggccggggaaggggctgcaggggcgtggaggggcaggactgaggcaaggaagaagctgggtgctgcagcagggatggaggtggagagaggtcgtttcttctgtctgatgaattccgcctaatgcacctggctaactcctagtcatccttcaaaacccctttctagtgatctccctgcgctttaggaaattgtctcaaaactaaggttgagctttggcgaccttccctgggctcccccgtccctgactgcccccagcagggagtgtatgtgcactatccaccccagcctcctagggtgaggcctgggaggcaaggctcagttctttctgggtccccgcccccatgaatctgggcagctggaggcattgataagtgaggacaggacctagggaacgcatgggagaaccgcaggattgggtccctggagacttaccaaactgggaggtgcgggtggggtaacgggtgccttgcttccctggcactgccttattttctgtccctcaagacctgccgtctccttgttgttttagactctggctaaagtcttggaggctactgccttgaagatgacctctagggaccagcccagacccaagggccccccgaaaagcacttcggtgaggagggcatgtggtgggatcagccctcaagggaaacccgggcccaatgtggttctgccccttttccacctgtgacctgggctggccccgcccaggcctcgcagctgaagacaatactggtcgctgctacactcaagacaggtgccaaggagccgtgttttttaaaaaaaattaagtgtaggctggacactgtggctcacaactgtaatctcaacatttttggaggccgaggcaggaggaccacttgagcccaggagtttgaaaccagcctggacaacgtagtgagaccctgtctctgtaaaaaataaaactagaagaatcagctgggcctagtgacgtgggcctgtagttgcagctacttgggaggctgaggcagagggttggcttgagcccaaggagtttgaggctgcagtgaactatgatggtgccactgcactccatccttggtgacagtgagatcccatctaaaaaaaaatgtagcatctaatcacatatgtgataaaaacacaggaacacatcatgtatttggttgatgttttacaagcaatccccgctccctgcactttgcgtcccagagatgaccatttgtaaatttaggctctcagggctgagcagacgtttttttttgtaaaggagtcagatgagggatattttgttttgagactttatgattttattatgtttgagacggagtctcacactcacctcggctggaatgcaatggcgcaatctcagctcactgcaacctctgcctcccgggttcaagtgattctcctgcctcgcctcccgagtagctgggactacaagcacctgccaccatgaccaccaaatttttcttgtatttttagtagagactgggtttcaccatgttggccaggctggtctcgagctcctgacctcgtgatctgcctgcctcagcctcccaaagtgctggggttataggtgtgagccaccacacttggccaagagactttattttattgagtcttgctcttgttgcccaggctggagtgcagtggcgcgatctcggctcactgcaacctccacctcccaggttcaagtgattctcctgcctcagcctcccgagtagctgggattacaggtgcgcgccaccacgcccggctaatttttgtattttcagtagagacggggttttgctgagttgcccagggttgtctcaaactcctgacctcaggtgttctgctcacctcggcctcccaaagtgctgggattacaggcatgagccaccttgcccggacttttatttttaaaaatattttgtgcttctattttcatcacaagaatgtggtgaacattttagactttaggccaaagtgcaaaatggaagatgctctttactgaaataagagaggccgggcgcggtggttcatgcctgtcattccagcactttaggaggccgaggcgggtagatcatgaggtcaggaggttgagaccagcctggccaagatggtgaaaccccatctctactaaaaatacaaaaataagccaggtgtgttgccgggggcgggcgggggaggggggcgcgggcgcatgtaatcccagctactcgggaggctgaggcaggagaatcgcttgaacccgggaggcagagtttgcagtgagctgagattgtgccactgcactccagcctgggcgacagagcaagactcggtttccaaaaaaaaaaaaaaaagcaaaaaccacaattacttttgcaccaacctaatgcctatgccatgttgaggtggagaccgggggtcttgggtgttggagcattgtaagttttatgtaaccttgctttgacctttccagccttgtcctgggatctcgaactctgagagctctccgacgctgaattatcagggcattctaaatcggctcaagcagttccccaggtgagagcaattccaggggccggaggtctcacgctgggaaggagccccacctggcctctctcccgggggtcctagtgagtggtctagaggctgctggcccaagagccaggctcaggaacaggaagccatgcagatacccagcatggagaacccggcaatacccatcccagcttttgattaaacaaaattaccaacaaatattaaaattttgattttcctgttcgacatggatttgttggcattcaattttattgttgaaaaatactgcaacggctgggtatggtggctcgcacctgtaatcccagcactttgggaggcggaggcgggcggattgcttgaggtcaggagatcaagatcagcctggccaacatggtgaaaccgcgtctctacaaaaaatacaaaaatcagccaggcttggtggtgggtgcctgtaatcccaactacttgggaaactgaggcaggagaatctcttgaacccaggaggcggagggttgcagtgagccaggatcacaccattacactcaagcctaaggctacagagtgagactcggtctttaaaaaaaaaaaaaaaaaaaagtactgcatgggctgggtgcagtggcttgcacttgtaatcccagcactttgggaggcagaggcaggaagatcgcttgagcccggagttcaataccagccttggcaacatagcgagatgccatctcttaaaaaataaaaaaaatctagctgagtgtggtggtgcacacctgtagtcccagctactcaggagactgaggcaggaggatcatctgagcccaggaattggaggctgcagtgagccatgattgtaccactgcaccctagcccgggcaacagggtgagattctgtttaaaaaaaaaaaaattgaagaaagtggcggggcgcggtggctcaagcctgttgtaatcccagcactttgggaggccgaggtgggcggatcacctggagtcaggggtttgacaccagcctggccaccatggtgaaacactgtttctattaaaaatacaaaaaaatagctgggtgtggtggcaggtgtctgtaatcccagctactcgggaggtcgaggcaggaggatctcttgaacccaggaggcggaggttgcagtgacactgcactccagcctgggtgacaagagtgagactctgtctcaaaaaaaaaaaaaaaagaatatactgcattaaaatcttactgaacttcttgacactgccttaaatttggcttctggagccagtgccttccagcttcattgagaccctccctaggggttgagggtggggctcactctggggagggagtcctgaagccacaggtcttccagcctgtcctccttccccctcaggttttctcctcattttgctgcggagttggagagcatttactactcggtgagccagacccaggcagccccaaccaaggagggccccactgggacaagctgaggccctggtttcccggccctgcctcctgagtgccctagagaggttcttttccgccaagcactgtgcctcacgcctgtaatcccagcactatgggagggcgaggcaggtggatcacctgaggtcaggagttggagaccagcctggccaacatagtagagaccctgtctctactaaaaatacaaaaattagccgggcatggtggcaggtgcctgtactcccagctactcgggaggctgaggcaggagaatcgcttgagcccaggaggcagaggttgcggtgaactgagatcacactgtactgcagcccaggtaacagagcaagactctctctgaggaaaaaaaaggtagggaccatacatcagtgtagtaagaaagtaaaagagaaaacaaggtgaaaacaaaaatttaaggtgggggagtaggggccagagaggtagagcagcttgcccagggtcacacagcattcacacccggaccacctcccgatgggatctctgttttccctttgcagctgcacaagatccagcaggatgtggcagaacatcacaagcaggtgggtgaccaggagctcaggggtgcggctgtccctccatgaaaggcatgagaaagcacagaggggggccgggcacagtggctcaaacctgtaatcccagcactttgggaggccgaggagggtggatcacttgaggtcaggagttcgagaccagcctgatcaacatggtgaaaccccgtctctactaaaaataaaaaaattagccaggcgtggtggcgggcgcctgtagtcccagctacttgggaggctgaggcaggagaattgcttgaacccgggaggtggagattgcagtgaggcaagatcgtggaactgcactccagcctgggcgacagcgagactctgtctcaaaaaaaaaaaaaaaaaaaaaaggaggtgggggatggtgaagacagaggacgaggggtaggtcatgctgagccttgtgggccgtgggaaggacttgggctttgaccccaagggaggtgggagccatggaggactgctggcagaggagggacatgccctgacttggaagcccccgtgatattagtggaggccccatatcttggggagcatctcctgtcctgtctctgagctgcttccaagagagggtcagtcctgctccttccgctccctgggcccctgcgcaacctagatgaccctttgccggtcagttgctttggacagagagagcctgtgatggggcaggcacccggctgtgttcccctgcgtgtctgagtgttcaatgaggggccatatgacatgggagtgaggggagctctgcatgggagggggcgcccgggctcccatctcccagcccagggcgcctggcccaagcagaagtacgccttccagccctgcctgtcctcccgccacctggccttttctcccaggcgctggcaggattttccgcctgtgccagatgtaactggcaggggcccagggccgtgtctgcaacttagcagggcctgggaggaggggggcagcgaagggaacagggtgagggggggccaggaagcaaccaaaacatggttattcattcagcagatatttatccatcacctccttgccaaatactgttgtagaagccaggaaaatagcaaagaacgacgcagagcttcccacccttggggcgagtggagcctggtagatggagtgttaggggatgagggctgggcaaggcgggggatggaagagagcagccccaaggggattggggaggccagggtgggcgagggttgcaattcagggtggtcagggaaggcatgcgagaaggtgacatctgagcggaggcttaaaggacatcaaagaggaagtgtggctgtctgggatgggagggatatttcaggcagagggcacagcctgtgtgaaggccctgaggcaggacggtgcctgttgtgttggtcctgaaggcactacgaggaagcccgcatggctggagcagagtgagaggaggagggggggagggcaggccacgcatggccctgtgagcttcagggaggacttgggctttgaaccctgagggagggaggtgggagccatggagggcttcagacagagggcaggccctggctactgcggagaggacagagaagaaggaggagggatgagggcagaagcccgggaaccagttaggacagtccaggtgtggaatgctggttgcttagtgatgagaagtaattgaataattgtggacgtgttttgggaggaacttgaccgcagctgctgagcatcaggatacgcagggggtgagggctccagagcaaaggagccacttcggttgcagccagacccaggagggtccctgcccagcccccactgcagggggccccaggatccctggcagcccagcctggcctgtggtcctgggcagtccgcttcccccacccgctgcttccagttccgggctttcccagccgcctcgctgtgctttcaaaatcgccatcagcacagccccctcctccgacagcccgcctgccactctcccccgggagggctgctagcaggcacaagggagccacacttttcatgctgagcgcattaaagtgccggtaaattgcgcattaacgaggcggggtgaattggagagggctcccctgggatttgctgctgctgggcgggctcagctgggaaatccatcactggctgccccaggaggcatcagcctggagtccccccccccccgcggggctccgatggagggtctcccctcccggcccctccctccgccgtcctgctaaggaaacagacaggtagcctttttgtagaaaaaaacttaagagataggatcactcgccttgctttctttttttgttgttttgacggatcatgctccgtctcccaggctggagtgcagtgggaggatctcagctcactgcaacctccacctcctgggttcaagtgattctcctgcctcagcctcccaagtagctgggattacaggtgtgtgtcaccatgcctggctaacttttatgtttttagtagagacagggttttgccatgttggccaggctggtctcgaacttctgacctcaggtgatccgcccgcctcagcctctcaaagtgctgggattaccggtgtgagccatcgcacctggccaatttctttatactttgaacatggctactagacattccatatgcatgactatatttatgtattattccaattctacttgtactggatggtattgatctcgattttattctgtttactgagaaactacatttaacttcgggattgacagtggtcagatggcttgatttttgttgttgtttgttcgttttaaataaaacaccagactgggtgaggtggctcacgcctgtaatcccagcactttgggaggctgaggtgggcagatcacctgacgtcaggagttcgagaccagcctggccaacatggagaaaccccatttctactaaaaatacaaaattagctgggcatggtggcgggtgcctgtaatcccagctacttgggagcctgaggcaggagaattgctttaacccaggaggcagaggttacagtgagcagaggtggtgccattgcactccagcctgggcgacagagcaagactgtctcaaaagagaaaaaaaaattaccactgacttgtttctatcaattctccccagcaggtaaccctcagtttcttagtatctttccaaagtttaagcaaattaaaacgtcttcctcacctagggagacctaggtatgctgttttgctgcttgaagcctttttttttttttttttttttgagacaagtctcgctctgtcacccaggctggagtgcggtggcatcatctcgcatctgggctcactgcaagctccgcctcctgggttcaagccattctcctgcctcagcctcccgagtagctgggactacaggcacctgccaccatgcctggctaatttttttttttttttttgtatttttagtagagatggagtttcaccatgttagccaggatggtctcaatctcctgacctcatgatccgcccgcctcggcctcccagagtgctgggattacaggcgtgagccaccgcacccggcctgcttgaagtcatttgaagcaaagtgtggtggtggtcaggttttctttttaaaacatcccaaaaagagtagctggggccaggtgtggtggctcacacctgtaatcccagcactttgggaggccaaggcaggagaatcatcttaggtcaagagttcaagaccagcccggccaacatggtgaaaccctgtctccaccaaaaatacaaaaatcagtctgtgtagtggcacacgcctgtaatccagctacttgggaggctgaggcaggagaattgcttgaacccaggaggcggaggttgcagtgagccgagatcacatcactgcactcctgcctgggccacagcgtgagactgtctcaaaaaaaaaaaaaaaaaaaaaaaaaaaaaaaaaaaaaaagatatatgccaggtgcgataggccggatgcggtggcttaaacctgttatcccagcactttgggaggcacacgtgggaggatagtttgaggccaggaattcaagaccagcctggccaacataatgagactcccatttctacaaaaagtgtatttaaattagctgagcgtggtggtgcatacctgtaaccccagctactcaggaggctgagatgggaggatcacttgagcctgggaggttgagggtgcagtgagctgtaatcgcaccactgcactccagcctgggtgtcagagtgagatcttatctgcaaaaaagtagatgaaggctgggggtggtggcttatgcctataatcccagcactttgggaggctgaggtgggcagatcacctgaggtcaggagttggagaccagcctggccaacatggtgaaaccccatctttactaaaaatacaaaaattagctgggtgtggtggtgtgcacctgtaatcccagctactcaggaggctgaggcaggagaaccacttgaacctgggaggcggaggttgcagtgagccgagattgcaccactgcactccagcttgggtgacagagtgagactctgtctcaaaaaaacaagtagattgatataccttcttctacaggtggggataatcatgctgtaggattgcaaacccttaactgcaacaacatttaactgttttgctgccaacctccttctagataggaaacgtcttacagattgtggagagctgcagccaactccagggtttccagtctgaggaggtgagtttctgggtcttcaaggaggggaggggacaggcttgggtgaaggctcatcctcaaagctctcactgccttgttcctgccgggccaggtctcacctgctgaaccagccagccctgggacgccccagcaggtgaaggacaagaccctgcaggagtcgagctttgaggacatcatggccaccaggtcctccgactggctccggcggcctttgggggaggacaatcagccggagacccagctgttctgggacaaggagccttggttttggcacgacactctgaccgagcaactctggcggatttttgccggcgtccacgatgagaaggcaaagcccagagacagacgtgagtgtccctgagggtgagggggaaggggcagccacaggctgcgtctcaggggctgtgcagtgaaccctgctgttctctctgtccccctcctcctctccgttgtcatggtgacagagcaggcaccaggcctggtgagtaaacaacctcagctctatccagaggggtgggcttccgggcaggcggttgggctcccccaggtcagggcactggggttcctgtgggatttgtcttccttccatcctgcccctcgggtcccccgggggggacttgggtgatccaggaggctatactggagtagcccaggacccacagcccagggcttccaggaccctataccctgactctctctctgcaactctgcctggacccgcagacaggaccccaggcagctgacaagccctgtgcaagctgcccaggaatccgaggtcttctggtcctaacaggcaggtcagcaggcctgatgagacttttccattttccaggggcaggaaagcaaggcaccaggatcctgtgacccaggaacagacccatgtcctgaagatgcctccagtaatcccagcgggcaggggccgaccgactccaggcgggatggggtgggggcatcctgtgctgaggagccaatgcaagccgcttagcccctcttgtctccccactagcccccaggccacctgaggcctcctccagtccccctgagggttcccaagacaggaacacaagttggggtgtggtccaggtgagacccaggcccgagctggtagcccagcgtgaaggctgcccagggtggggtagaggaggtgggcacagatgtgcggggaggctgggggcagctgtgatctcccccgcctgcaggagcctcctggaagagcctctcggtttctacagtccatgtaagtgtctgcactgtttgcttttgggcggggtgaggggcagcgggaattccttcctgtctatacctctgttcccgacacatagaggggaacagaggtgtaagactttcttccccttttcccatcactactctgccatcctctccaacagccgctgcagaggctgggtagaaaagtgcagtgttaggccgggcgcggtggctcacgcctgtaatcccagcactttgggaggccgaggcgggcagatcacgaggtcaggagattgagaacatcctgggtaacacggtgaaaccccgtctctactaaaaatacaaaaaaaattagccaggcgtggtggtgggtgcctttagtcccagctactcgggaggctgaggcaggagaatggcgtgaacccgggaggtggaggttgcagtgagttgagatcgcgccactgcactccagcctgagtgacagcaagactccgtctcaaaaaaaaagtgcagtgttaggctcacaggatcgccgccccaacactgggctcaaggcatttggggaagactttttcatggaaggggatggggtgtagctgtgttagaactggatgcagattgtcccaaccttgtggagtgatgctgggagaacccaggtggggcaaagaaggcttttctggggaaggagcataatagctaggaccataaaggatgaataggagttcttcctcctggggcaaagcagtctaggaagaaggcagaagtatgtggagggctgtggcaaagggacaatacttgaaggaatatgagcaggacattgaggggagtctagagggtaaaacaaggcctgagagagggaccccaaaatctgaaaaagaagcccctctaggccttgatgtgtggctcccactgggcaaaggggctcacaagcaggtcagttaccccaaggcctcccctcccaagatcctgggaccctgaggactttgaagatgcatggaagaggccagatgccttgcccgggcagtcaaagagactcgccgtcccgtgcaaactggaaaagatgcggatcttggcacacggggagctcgtgctcgccacggccatcagcagcttcacgcggcacgtgttcacctgtggcagaagaggcatcaaggtgtggagcctgactggacaggtggctgaggacaggttccctgagagccacctgcctatacaggtgaggacggccttggtttccagggatgcagggcttctgggaacagggggtttgaggtttgagtctggcagagcccagatcgtggagagagggcttccagggaaaaggggcataatagctaggaacctaaaggatgaataggagttcgctctcatgaggcaaagcagtccaggcagaatgccacggggggcgacagctcacagtgactctgcccatcccagacccctggggccttcctgcgcacctgcctgctgtcctcaaacagcaggagcctgctcaccggtggctacaacctggccagcgtgagcgtgtgggacctggcggcgccctccctgcatgtgaaggagcagttgccctgtgcaggtctcaactgccaggccctggatgccaacctggatgccaacctggccttcgccagcttcaccagtggtgtggtcaggatctgggacctgcgggatcagagtgtggtcaggtgcgtttggggggtgggaaggggaagcatcctgtgccagcctcctgtggccacctctgcccaccttactgctaccacctctgcccgccttcctgccacctcctgaacctgggatatagcactctcccagccaaaaccccttgcccccttgaacttggatttgagaaagtttagaggtgcggacttgaatcttggctggactgcgttccttgcagcccagggcattttactttttgtctgcctcagtttccccacctggacacaggatgtgacagccccaaactcaaaggcttgttagagggcaaatttgttgtaaaaatataaaacagcaggccaggcctggtgcctcaaacatgtaaacccagcactttgggaggtcaagacgggacaaatgcttaagcccaggaattcgagattaacctgggtaatgaataaaacgaatttattctatttttattaaatagaataaattttatttaataaaaattaaatagaatttttatatagtctatttaaaaatatgtatatataaattggccgggcgcagtggctcacgcctgtactcccagcagttagggaggccgaggcaggcagatccacgaggtcaggagatcaagaccattctagctgacacggtgaaaccctgtctctactaaaactacaaaaaaattagccaggcgcggtggtgggtacctgtagtcccagctactcgggaggctgaggcaggagaatcccttgaacccgggaggcggagcttgcggtgagccgagatctgtgccactgcgttcccagcctgggcgacagagcaagactctgtctcaaaaaagaaaaaaaaatacacacatatataaataaatatatatataaatacataaatatatacataaatatatacataaatatatacataaatatatacatatataaaaaacagtctgggtgcggtgtctcacacctgtaatcccagcactttgggaggccgaggtgggtggatcacttgaggccaggagctcaagaccagcctggccaacatggcgaaaccccctctctactaaaaaatatgaaaattagccggcgtggtggcacatgcctgtaatcccagctaccccggaggctgaggcaggagaatcgcttgagaagcggagtttgtggtgagccaagatggtgccactgcactccagcctgggtcacagagtgagactctgactcaaaaaaaaattttacatacatacatacatacatacatacatacatacatatatgtatacacacacacatattaaatatatgtaaataggctgggcatggtggctcatgcctgtaatcccagcactttgggaagccgaggcgggcagatcacctgaggtcgggagtttgagaccaggctaacatggagataccccatctctactaaaaatacaaaattagtcaggcgtggtggcccatgcctgtaatgccagctactcgggaggctgaggcaggagaatcgcttgaacccaggaggcagaggttgcagtgagctgagatcgtgctgctgcactccagcctgggcaacaaaacgagactccatttcaaaaaaaaaaaaaatacgtatatatatatatatatatacacacacacacacacacacacacacacacatatatataatatatgtatttataacatataagatatctatcagcatatgtttgcaggaagcaatggctgacgtaaaatacagcacaccacccgcccggcactattccccttccctgcttgaagggattcctgtagacctgcctcagagctcgggtggactcagggtggaagaggcaaggggaggcctaggtgaggccaaggggaggcccaggcggacggagaagggaggctgagggctgggaggggccggcactagatcctgtgtctgttttctgccaactttgacactctgtgcaggcagagatttttgggtggtggcactgtccctttcatgcccaaatgtagtgactggtgtttccgggggcccaaacctcagagtcttgacctgattgcctcccgatgtcccttctggccagggacctcaagggttatcctgatggagtcaagagtatcgtggtcaagggctacaacatctggactgggggtccggatgcctgtctgcggtgctgggaccagaggaccatcatgaaacctctggagtaccaattcaagtctcaggtgcggaggccgggatggggtctgcttggccaggcatcctctggtcctcagattaaaaaatgaggttgaggccgggctccgtggctcacgcctataatcctagcactttgggaggccaaggtgggtggatcacctgaggtcaggagtttgagaccagcgtggccaacatagtgaaaccccatctccactaaaaatacaaaaatcagagctgggcgcagaggctcacacctgtaatcccagcacttttggaggccgaggagggcaaatcacctgaggtcgggagttcaagacgagcctgaccaacatggtgaaaccccgtctctactaaaaatacaaaattggccaggcatggtggcacatgcctataatcccagctagtcgggaggctgaggcaggagaatcgcttaaacccgggaggtggaggttgtggtgagccgagatcgtgccattgcactccaggctgcgcaataagagcgaaactctgtctcaaaaacaaatgaggttggccaggcacagtggcgtatgcctgcaatcccaccactttgggaggcagaagtgggaggaagacttgagcccaggagtttgagaccagcctgggcaacatagtgagaccctgtttctacaaaaaataaaaataaaaattagctgagcatggtggcacgtacctggggtcgcagctagttgggaggctgaggtgagagaatggcttgagcccggggaggctgaggccacagtgaactgtgatcataccagtgactgtagtccagcctgggtgacagagtgagaccctgtctcaaaaaaaaaaaaaagggggggaggcgggtgggggggggggaggatgaactctgggaaggaaaaaaggtagtggttctaagtctcactgatgctccaaacacagagatcattagaaatattctttgcaggccgggcgcagtgtctcacgcctgtaatcccagccctttgggaggccaaggcgggtggatcatttgaggtcagaagttcaagaacagcctgaccaacatggtgaaaccccgtctctactaaaaaaaaaaaaaaaaaaaaaaaaaaacagaataattagccaggcatggtggcgcatgcctgtagtcccagctactcaagaggctgaggcgggagaatcgcttaaaccccaggaggcagacgttgtcgtaagccgagatcgtaccattgtactccagcccggcaacagagcgagactccgtctcaaaataaacactcatgctgtatcaggtgcaaagtagggaagactctccattttacacaccaacaaactgaggcacagatacgaagttgcttgtcccagggctgcacagctaggaaggggtcagtcacccggcctccaggataggtccccaggctcctgcctgcttcctgggccaggctgggacctaaccaggttcctccctccccactgcccattacctagataatgagcctgtcccacagcccccaggaggactgggtgctgctgggcatggccaatggccagcagtggctgcaaagcaccagcgggagccagcggcacatggtggggcaaaaagacagcgtcatcctgagcgtcaagttctccccctttggtaagcggctggcggaagatgaggggactcccctgcagcccccagcctcccacaagaccccacctaatgccagctccccacccaaccctctaggacacctcagaacccttctgtagcagaaaccaattttggggatgctcttatagtggaatgagggagggaagggggtgggtgcctgggcccttcctccccacccgccccaccggcgcggtccgcctccgcccttcccccttcagccactggtgtccccatgagcccggggaggctgaggccacagtgaactgtgatcataccactgactgtagtccagcctgggtgacagagtgagaccctgtctcaaaaaaaaaaaaaaaaaaaaaaggtgggtggggaggatgaactctgggaaggaaaaaggtagtggttctaagtctcgctgatgctccatttctcccaggccagtggtgggcaagcgttggaatggacgacttccttggcgtctacagcatgccggcggggacaaaagtgttcgaggtactgcggtgggctgggggcaggacccgggggtggccccaaagggaccagcctgggcaacacagcaagaccctgtctccacaaaaaacttaaaaagtagccaggtgtggtggctcacggctttaatcccagcattttgggaggctgaggcaggaagatctcttaagtgtaggagttcgagaccagcctggccaacatagtgagaccccatctctacaaaaaataattagctgagccgggtgcggtggctcacgcctgtaatcccagcactttgggaggccgagacgggcagatcatgaggtcaggagatcaagaccatcctggctaacacggtgaatccctgtctctactaaaaatacaaaaaattagttgggcgtggtggtgggcgcctgtagtcccagctacttgggaggctgaggcaggagaatggcgtgagccagggaggcggagcttgcagtgagccaagattgtgccactgcactccagcctgggtgacagagactccatctaaaaaaataataataataattaaaaacacttttaaaattaaaaataataattagctgagtgtggtggtgcacacctgcggtcccagctacttgggaggctgaggcaggaagattgtgtgagtccaggaggtcgaggctgcagcaagctgagattgcaccactgcactccagcctgggcaacagagcaagaccctgtctttctttgaagagacgatgcttcatgcttgagctgacaggtggagaccaggggtgtgtgagccctaccccagctcactgcccactgccccccctccaggtgcctgagatgtctccagtcacgtgctgtgacgtctcttccaacaaccgcctcgttgtcacaggctccggggagcacgcctccgtgtaccagatcacctactgaggggcctcgctgctgtcatcccactccggctcctcttttcatccccccccttccccccccccaacaagggggacatggtggagggaagcgggaaggctcttctgtggcatcgcacgatctagtctgtggtgtagactggtcgccatcacgtgtaataaagcacccgggaaaggcagagtgtggacgcgtcctgtcctctgaagggaaaggggccttcccatcccgtccctgctcaacttgtggaaatctggaaggacttcgtccagcctggtggctctaagcctttttttttttttttttttttttttctgaggcagggtctcactttgttatgcaggctggagtgcagtggtgccatcacgactccctgcagcctctccaactcctgggctcaagccatcctcctgcctcagcctcttgagtagttgagactacatatatgtaccaccgtgctcggctagtttaatttttttgtagatgctgggtgtggtggctcacacctgtaattccagcactttgaggtcgggggtttgagactaacacagtgaaaccccatctctactaaaaatacaaaaattagctgggcatggtggcacgtgcctgtaatcccagctactaaggaggcagaggcaggagaatctcttgaacccgggaggtagaggttgcagtgagccaagatcgtgccactgtactccaacctggcaacggagcgagactctgtctcaaattaatagaaataacaaaattttgtgtagacacagggtcttgctctgttgcccaggctggtctcaaattcctgattttatgtgattctcccacctcggcctcccaaagtgctgggattacaggcgtgagccactgtgcctggtctcaaactcctgatttaagcgatcctcctaccttggcctcccaaagtgctgggattacaggcatgagccaccgtgcccagccctctgagccgtttccgtcctcgttctctgggaatctagtcacagccacagactttgctgttggggtagcagatctccacctccgccgcccggagcagctccaatctggtccgatgtttctggtgtgattccaggagcagtgtgagtggtcctgtcctagacatgtcccatttgaccagtagtctccagtagggtgattctgccccccggggactctaggcgatgtctggaggcatttctggttgtcacgacttgtggggtccccctggcatggagtgggtgggggcagggacattactcaccattctgtggtgcccaagacggccccaccccagaggatggtccagtcccgaggtccacagtgctaaggtcgaaacaaatttccaatagcttcactggtcggccttcttcccacacaagctagggctctggaaacgccacttgcccaccctcccttttccaagctatgaaggggcccagatgtcaacgggcctaggctccttaacccagagaattatcccctttcctgcggtgtctccagaaacatccaccagggcgtgccttctgttctcagcaggaaccctcccatctccttctagaatgttcccagcggcatctactccgcccaacctatgctgccttaaattttttttctagagatggagtcccactattgcccaggctggtctcaaactcctgggctcaagcaatcctgccgcctcagcctcccaaagtgttcagatgacaggtgtgagccccagcaccggtcctaacccttgctgtacgtggtagcccacctgagcttccagaacacggggctgattgccccccactctccccgctccccactgaagccttgtctgcaggcctcgttctccagaacctggctgtcttctgggtaaccaccaggccgagttccccttgcctctgagatatcgcatccgccattctcctctttccagaacagtcttctcagggctctgggggctgtttctcatcccttagtgctcagtgtacccctcccctccactgggcagggacgtttgctcagccctttgccatgcgcagggctcttagaaatccttggaatctagccaggtgcagtggctcacgcctgtaatcccagcactttgggaggccgaggtgggtggatcacctgaggttaggagtttgggaccagcctagtcaacatggagaaacattgtctctactaaaaatacaaaaattagctgggtgtggtggtgttcctgtaatcccagctactcgggaggctgagggagaagaattgcttaagcccaggaggcagaggttgcagtgagctgagatcgtaccactgtactctccagcctgggagacagagtgcgactgtctcaaaaaaatttctacccggaggcctgagtgactacctggagtagagccccgtacaccatgtgggtatgagcaaggaaaaaatgcatgaaccctgagactcggggactacttgttacgcaacagcatcttaacgatcctgcccagcgcaactcctgtgtctcagagtggctctcacataccaggcagacacctctgaatatcctgcagaaagaattctcgttacgtatgaccccatccccaggacatggttgcctcccagtaaccgtgcccaagaggaacaatgatcaccggttccccagcccgagagagaagtgcggatgtgatagatacattttatttccaccgaggtcccctgcccatcggcccccacatgcagcaggggaaggtgtgaagccgttggccagagagcagatgggatgtacggttcctaggcagggctgggaggcggctgctaggatgtctgtcctggctgctgattcccctgggagtctggacttcgggtacaggaaggggggtcatgtctcagtagaccacctcatacacggtggccttcttgtcccccgagcctgtcacgatgtatttgttatttctggagatgtcacaactcaggactgaggacgactccttggactgccaagggaagggagagagaaaagggcacagtgaggcatggtccccacagatgggtgtgtgggcaaggctggggcggagtcaggaacgggaggtcaggactcgcctacagagtgacgtgtttctttttttgagatggagttttgttcttgtcgcccaggctgaagtgcagtggtgcgatcttggctcactgcaacctccacctcccgggttcaagacactctcctgcctcagcctcccaaatagctgggattataggcgcccgcaaccacgcccggccaatgtgtgtgtgtgtgtgtgtgtgtgtgtgtgtgtgtgtgtaatttttttttttttttgtgagacagggtctaactctgttgcccaggctagagtgcaatggtgtgatctctgctcactgcaacctccgcctcccaggttcaggcaatcctcctgtctcgaactcccaagcagctgggattgcaggtgcatgccaccatgcctggctaatttttgtatttttagaagaggcagggtttcaccatgttggccaggttgggcttgaactcctgacctcaggtgatccgcctgccttggtctcccaaagtgttgagattacacgcatgagccaccgcacccggcctaatttttgtatttttagtagagactgggtttccccatgttggccaggctagtctcaaactcctgacctcaggcgatccaccgcctaggcctcccaaagtgctgggattacaagcgtgagccaccgcgcccggcagagcgacttgttttctacagacaggtgctttggagctaagtccaatgggcagaacagggcctccattccctcaataccaagagagatggaactgaagtgctgccctttctggaagctcagagtgggtgtgcaccaggcatgatgtcacacagcacagcagagggccaaggcaatggcttagaccagggatcagcaaacttcacaaagggcctggtaaacattttaggctttgcctaaagtctaaataagtccatgtcacatattctgggatttttttcttacaaccctttgaaaatataaagggttggcacggtggctcggcgcttccggaggccgaggcaggtggatcacctgaggtcaggagttccagaccagactggccaacgtggggaatccccgtctctactaaaaatacaaaacttagccaggcatggtggcgggcacatgtaatgccagttacttgggaagctgtgggaggagaatcgctttaactcaggaggtggaggctgcagtgagctgagattgcgccactgcactccaggctgggcgacagagaaggactccgtgtcaaaaaaacaaaaaaacactgtaccaaccaggacgggcatattaaaaacactgtaccaaccaggacgggcatattaaaaagacagccaataacaagtgttggtgaggatgcagagaattttaaaatttcaatcactgctgatggggatataaaatttgaaaaacaggctgggtgtggtggctcacacctgtaatcccagcactttgggaggccaaggcgggtggatcatgaggtcaggagatcaagaccatcctggctaacacggtgaaaccccgtctctactaaaaatacaaaaaattagccaggtgtggtggcgggtacctggagtcccagctactcgggaggctgaggcaggagaatggtgtgaacccaggaggcagagcttgcagtaagcagagatagtgccgctgcactccagcctgggtgacagagtgagactccatctcaaaaaaaaaaaaagaaagaaaaacagctgggcgcagtggctcacgcctgtaatcccaacactttgggaggccaaggtaggcagatcacctgaggtcaggagtttgagaccagcctagacaacatggtgaaaccccctctctactgaaaatacaaaaattagccaggcgtggtggtacatgcctgtaatcccagctactcgggaggctgtggcaggagaatcgattgaacccgggaggtggagcttgcagtgagccgagatcgcaacactgcactccagcctgggagacagagcaagattctgtctccaaaaaaaaagaagaaatgagtaagatggcaaattttatttttatttatttatttttgaggcagagcctcactctgtcgcccaggctggagtgcagtggtgcgatctcagctcactgcaagctccacctcctgggttcatgccattctcctgcctcagcctctcgagtagctgggactacaggcgcccaccaccacgcctggctaatttttttgtattttttttagtagagacgggttttcaccatattagccagggtggtctcgatctcctgacctcgtgatccgcctgcctcagcctcccaaagtgctgggattacaggcatgagcgaccgtgcccggctggcaaattttaaattttataatattatatgcatgttactgcaactaaattttagaaaaaccaacaggctacgggcagatgaggcgaggcctccggctgaaattccaacctctgctttagtacctgggcggtagggaggcttgcaggaccctgaggaggggttagggtggcggggggacctgggggacagggacaggggcaatctctctgtctgaccctggcatacccgggcacatggccctgccagagtgggggctccagaccgccgagtacctggaaaatgctggccccgtacggcgtcctccaggcgttgagcaggttgtccttcccggtgctcacaaaccaccgtccttggggaaggagagcagcagggttcaaggagggggcactaacgagagacccgggctgcagggggaggtcggggaagctgggtctgggtctggcctctccctttttttttttttttttccaagaaagggtcttgctctgtcacccaggctggagtgcagtggtacaatcatagctcactgcagcctccaccacctggactcaagcgctcctcccaagcagctgggaccacaggtgtgcaccaccacgcccagctaatatttttattttttgccgggggcagtggctaacacccgtaatccccactttgggagacagaggtggctgggtcacttgaggtcaggagtttgagaccatcctggccaacatggtgaaaccccttctctactaaaaatacaaaaatcagctgggcattgtggcaggcacctgtaactccagctacttgggaggctgaggcttgagaatcgcttgaacccaggacgcagaggttgcagtgagctgagattgcgccactgcactccagcctgggtaacgcagtcagactctgtctcaaaaaaaaaaaaaaatattttttgtagagttgggatctcactatgctgcccagactggtctcaaactcctggcctcaagcgatcctcccaccgtggtctaccaaagtgctgggattacaggtgtgagccactgtgcccagcccaagttttgtttgtttgtttgtttggtataagatatcccatgtactatttaggatatacttacactaatgaatgatttttttttaaaaagagatagggtctcactgtattgcccaggctggagggcagtgatgtcatcatagctccctacagcctcaaagtcctgggctcaagcaatcctcctgcctcagcctccctcgtacctggcactacaggtgcgacctactggctgtttaatttttttgtagagaaagtcttgctatgttgcccaggctggtcttgaactcctggtcttgggcgatccttctgccttagcctcccaagtagctgaaactacacacatcagctactgtgcctggcttaaatttcttttctttctttttttttttttttttttttttaagatagaatctcactcttgtctcccaggctggaatgcagtggcatgatcttggctcactgcgacctccacctcccgggttcaggcaattctcctgcctcaacctcccaagtagctgggattacaggcgcccaccaccacgcctggctaatttttgtacttttaatagagtcagggtttcaccatgttggccaggcttgtctcgaactcctgacctcaggtgatctgcctgccttggcctcccaaagtgttgggatgacaggcgtgagctaccacacccagccttaaatttgaatctcagataagtcatcagtaatttttaggacaggtatatcccaaatacttcattatttggtttttagtataagtatatcccacacaccatttgggatatacttgtactaacgatttgcttttgagtatataaaacttagtatataaataacattatttgttatttatctaagattcagattgaataggcaccctgggttttgttggggttttgagggcgtgccaccccgccccagaagacacaccgcaggaggcaaacttcagggacagcacgcagctctcgtggaggtgcagctggtatttctccggcttgcggacgtgcaggatctccacgttgctactctccattccgaccgccagccagtcctggttagggcagtggcccagggagaaaatctgggggtaaagagggaagagatggggtcacgagcccctctttgttttgtgttgagacagggtctcactccgtcacccaggctggagtgcagtggcacaatcatggctcactgcagccttgacctccagggctcaagagatcctcctgcctcagcaccagaagctgagactacaggcatgcaccatcacgctggataatctttttttttttttgagacagagtctcactgtgtcacccaggctggagtgcaatgttgcagtctcagctcactgcagcctctgcctcccaggttcaagggattctcctgcctcagcctccaaagtagctgggattacaggtacctgctagtacgcccgggtaatttttgtatttttagtaaagacggcgtttcaccgtattggccaggctggtctcaaactgccaacctcaagtgatctgcccgcctcggcctcccaaagtgctgggactacaggtgtgagccaccatgtcagcctacgagcccctttggatattggggggtgcccagcaccatcaggggttgcgggggtggagtccaacattctccctcttcagcacccccctagagaaaggcagctggcccaggactgggaacacagcagacaactgcatgtcgaatcattaatattaatcagaattacacagaaccctagggctgcacatccattatctgctctgagcgcacaacagcacagggaggagggagagaggagggaggagggacagagaagggaacagccaggcaaggacaatcactccccttaagcagatgatggaagctgaggcagtgtcccctcaaggtcacagagcaagactatgaaagaccaggccttggccgggctctgtggctcaggcctgtaatcccaacactgtgggaggccgaggcgggcggatcatctgaggtcagaagttcatgaccagcctggccaacatggcgaaaacccatctctactaaaaatgcaaaaattagctgggcgtggctgcaggcacctgtaatcccagctactcgggaggctgaggcaggagaatcgcttgaacttgggaggtggaggttgcagtgacctgagattgcaccactgcactccagcctgggtgacagagcaagactctgtctcagaaacaaaaaacaaaaaaaataagacagaccaggcctaggagacagaacttctcactcttagcttggaatgttcctttttgagacagacagggtcttgctctgtcgcccaggctggagtgcagtggtgcaatcatgacccactgcagcctcaacctcctcccatgctcaagtgatcctcccgcctcagcctcacaagtagcttggattacaagcatgtgccaccacacctggctaattttgtatttttggtagagatggagtttctccatgttggtcaggctggtctcgaactcctgacctcaagtgatccacccacctcggcctcccaaagtgctgagattacaggcgtgagccactgcacccggcctcggtttgatttttaaaagattcagggtcctccacctcattttaagcacaaacaggaatcaggctctgttccaccccaaacctcttggagtctcactaacaagatgcctgtggaaataaccacacatttgcagaagagaagactggagggcttcaaatgtcctctcctggccatacagaagtgtttctgtgtaaagacgcattgggggacacccagtgagctaggagatattcaccatgggatccctagaaatgttcttagcccacctaagcttcggggccacgggatggagagctgtgtccacctgcactcctgaaagagaagagcaggttggacataaagagcttgggagggcaagcgcggtggctcaggcctgtaattcccacactgggaagccgaggcaggtggatcacttgaggccaggaatccaagaccaacctggacaacacagtgaaaccctgtctctaccgacaaatacaaaaattagccgagcatggtggtgcgttcctgtagtcccagctactcaggtggctgaggcacaagaatcatttgaacctgggaggcgcaggttgcagggagctgagatcacaacacagcaactctgtctcaaaaaaaaaaaaaaaaaaagaggagcttcggagttaggagttagctcctcttaggtttcaaggaggaggggcaaatgagatgggtcttgagggatgaataggagtttgccaattacagaaagaagagaaaggcatttcagccacagggaacaaatgtgcagaggcctcagagctgtcccggagtatggtgtgcatgagaccagcccatggaaaccctgaatgacagaagaaggagctcacagctgcccccaaagcagtgagaggcaggatctggggtcacggtgcctgaagattcactctctttgcccagccctgaggagcccccagctctgtccagcctgttcaccatgtccttcagcttagactccaccttcaatggggatctctccatgcccagctcctcctacatcaacctccactctgtcctcctggccagtagctcccccatggttagtcctcagttgggaagtgtgtgtcccgcgctctcggcggcgtccagagattaaaggctagaagaaccacccagctacacgaggaaaggcacatataagggtatggctggacaaaagcaggtggggaagatgatctgggggtctcagtagccccacagcttcctatgaatcagctcttttgtgttcccctacatctttagagagttacaggggaagcctgtggatgtgtctgggggacaagaaagatggacaccacagcagatgggagtcctgtcctgtcctgcctctggaagtgggcacctcacaaggagaggaagggatgctgtattcctagagcttccatccccctcctgccagaaccgaacagcacctgggagctgaagtcatgctgctgcagctggcggccctcccgcaggtcccagcagcgcaccgtgttgtccaggccccctgtccagagccgagtgccgtaatcggaaatatcaatgcagctggcgccgtccgtgtggccctggaactgcctggagggagaagggcccaggcgtccatcctggaattcgagctgccccagcatcgtcccaggtcacactcctccactccccctgcaccgagagcggccgggggcttgcccaaggtcccagcgcacctgccacccacctgaccatagtctgattctgcaggtcccagaccacaatgttgccatcgctgcagcaggagaagcaaaccttggcgtcggggctgacggccagggcgtagcaggctggggctgaggaagtcagctcggccttgatacggggggtgggcgccgccaggtcccaaatggacaaggtgctggcctcaccgcccacgatcagactccggccatccggcagcaacttgcaggaacgaatgtagttgtctcggttctggggtcggggagagaagcaggggctgggggttggtcccaggtgaggtctctaggagcctagctcaacgtgggggtctctggagcccaatgtagcctcatcctgattagcctgcaagccctaccctgattggctggtgagccccgcccctttgacctgcaaacactgccccatctgactataagctccatcctttacctataagccccacccatggttggcctgcaaaccctgtcctgattgtcttgcaagtccaattcagattggccagagccccacccctttggcctgcaagccttgtcccatgcgactacgagctccgcccctcacctataagccccgcccttcacctgtagccccacccacggccagcctgcgaacaccgccccattggaacataagccccacccctcacctgtgagtcccgcccactgtcccaccccgccctcaccaggcagtcgagctgggccacgggcgtcttggccccaggctggcccacgtcccacaccttcacacagcccttgccgcccgtgtacacatgctgtgtggagccgctgatggtgaccgcgcagaccacctcgccatgggccagcgtgtgcagctgccgggcgtgccgcgggatgcccgcgcctaccagtgcatccgaggggaagggaaccggctgcatctgcccgtccgcagacacgtggaaggagtaggccctggagagaaagccggggcatgacccagccctgggcaccacgcccccgcacccgcacctgggagggcagggagacgcctttgtcctgcctggcaccctctgatgtgttttttattttttgttttgttttttgagagggagtctcgccgtgtcgcccaggctggagtgcagtggcccgatctcagctcactgcaacctctgcctcctgggttcaagcgattctcttgcctcaacctcccgagtagctgggattacaggcatgcgccaccatgcctggctaagttttttgtatttttaatagagacagggtttcaccatgttggccaggctggttttgaactcctaacctcaagtgatctgcccgcctcggcctcccgaagtgctagaattacaggcgtgagccaccatgcccagcctgatgcgtttgtttcttttttgagatggagtctcgctctgtcacccaggctggagggcagtagcgtgatctggactcactgcaaactctgcttccggggttcaagtgattctcctgcctcagcctcccaaggagctgggattacaggtgcaggccaccacgcctggctaatttttttgtatttttagtagagatgggctttcaccatgttgctcaggctggtctcaaactcctgacttcaaatgatcctcccacctcggcctcccaaaatgctgggattacaggcatgagccaccgggcccagcctctgatgcattttttaaagtaattttctctgttattattttgtagagatgaggtcttgctatgttgcccaggctggcctcaaactcctggtttcaagtgatcctcccgccttggcctcccaaagcactgggattacaggagtgagccatggtgctcggcctctgatttaggaaaaaggcaggacaatgtggtcaaaggtgatatgggacagtcagtgggtggcacaaatacacagggagtctaggttgtggtgtggcgcatggtaaacaagcacttaataaatgttcgttcaaccgaggacccacaaagaaaccttgagtgttccagaccagctagagggtctgtcctaggagccccggccacctgtgaccagttaaaacacttaaatgaactgaaattaaataaacattttcaggccggcacagtggctcacacctggaatcccagcacttcgagaggccaaggtgggtggatcatttgaggtcaggagttcaaaaccagcctggccaacatggtgaaaccctgtctctactaaaaatacaaaaattagccggcggtggtccgtgcctgtaatcccagctactcaggaggctggagcaggagaatcgcttgaacccaggaggtggaggttgcagtgagctcagatctcaccaccgtactccagcctgggggacagagcgaaactcagtctcagaaaacaaaacaaaacaaaacaaaacttttcagctcctcagttgcactgaccacatttcaagtactgaaagccacgcccagctggtggcgactgggttggccagcagtgggtctagaacacttccatcactgcagaaagctctgtggacactgtggccagatctcctctggtggagccatcctggacaatgcaggatgctaagcagcatccctggcctccacactccaggccaggaacgtctcctcccccagctgtgacaaccacacgtgtcccccgacatcgcccagtgtcccctggggggtcagagtctacttctatggagagccagtggaactctgagtagcttatgcaagagactttttttcttttttctttttttttttttgagactgagtctcgctctattgcccaggctggagtgcaatggcacggtctcagctcactgcaacctccacctcccaggttcaagtgattctcctgcctcagcctcccgagtagctgggattacaggtgcccgccaccacgtccggctaatttttgtatttttagcagagacatggttttgccatgttggccaggctggtcttaaattcctgacctaaagtgatccacctgcctcagccttccaaagtgctgggattacaggagtgaaccactgtgcccggcccacacaagagactttctagaagggaagcagggagaccccaaccacagagggtaagacctcagaggaggtggggggctggcccgggaccccaggcagggagccccaccctggtactcacggctttcccccagggatgctgggtagggaggaagagacggatgaccctcggagatggggatgagactcaaatgccatctgtgagaatgccaggggggtgtcagtgaggcaggtgactccaacccacctctgtgccaccccacgcccacctgccatacccctctctgtttatcacccctccccaaggcagcagagatgccttctctctgcctgtcacactacagatgagagggctgaggttttcacttgagcacaccgacaccaaaatctctatccaggaaatcctagaactccacggttccaaggatcctgaagggttctccatccaatgcccagactggctctaggccagggttctgaaaactccagcccctcccaggacaaatctggtccactgcctgtttttgtaaacagtgtcccgaggccaaggccctactgctcctcttcatgcagcttaatcgctgttgcgtttttccacaatcagaagtcttgctttgtattaagcttgtgggactactgagacccccagattgtcttcccatgcatacttgctgagccagggctcccttccctttctgcactcccttgtctctccttgtgtagttggtttctcctcccggcccccagcccctgggccctgctgacacctcctgcgcccccacccaaggactcaccacgggggagcgtccgtacaccacagagctgctgacctggggggacaggtggaggctgacgtaggagctgggcacggagaggtctccgttgagagtgctgtgggagcccaggctgaaggacgtggtgaagggactggacagagtcagggggctcctcagggctgagacggaagagtcggggacaggttttgacgccctggacccagatcccgcctcccactgccttgggagctccctggcctttcatttagagtttccatgtgctggttccacattggccatagcctgggacacctccagacctctgcactatcgttcctccagtggacacgactttctctctctctttttttcttttgtttgagatggaatcttgctctgtcgccaggctggagttcagtggcgcgatctcggctcactgaaacctctgcctcctgggttcaagcaattctgctgcctcagcctcctgagtagctgggactatggccattctccttcttttaattggcaaactcctatccatccttcaaaacccaggcccaccgagcacagtggctcacgcctgtaatcccagcactttgggaggccgaggtgggcggatcacctgaggtcaggagttcaagaccagcctgaccaacatggtgaaacctggtctctactaaaaatacaaaaattagctgggcatggtggtgcatgcccgtaattccagctactcaggaggctggggcaggagaattgcttgaacctgggagcgggaggttgcagtgagctgagatggtgccattgcactccagcctgtgtaacaagagtgaaactccgtctcaaaaaaaaaggaaaaaaaaaaacaaaacccaggcccaatgtccattaacatctcagaaacatccttgagcctccccattgccaacctccagccctgcccatcttgggtacctgccttggtaccagccctgactatacagggctgtgagttttggggtctgggtcctgtccctttttgccacctgggagttccttgagggcagattccaaggccagcttctttcaggggccccagaaccagcccagggcctgaccataaggcagaaaagatgagcactgtcattcctcagattactgatggggaaactgaggctcagagaggttgggtcacttgcccgaggtcacccagctggtgaatgcccaagcctggtctgaaacccaagtctgtctggccccaaagattgtctttccagtgcactaggctgaaacccccgactaagccgcttccactctccaggcctcagtttccctacccgccgagctgacacaatgaggaactgcccagagggaggcagcgtctaacttgaagtcacaaaaaggaccaaggcaatgaacaccaagcctggaatcccagcattctgcctctccagccccttttcctagatctccccagagacgaggcctgctccagacaggcaccaacaggcaaggtgctcaccgacgctgtccgtggaaggtgctggcttggcagcaagctggcagaggtgactggccgagctgggcccgggggtggaagcgtcctggggcggggaggagtcacaggatttggaggcaggagtgctggcgggaaggtcattctgcagagaaagggcaggactgaaggccaccaggcacctggtgtcttgtggcccaacgatctgatcagaaactggggttgggggcggccagtcgcagtgtctcacacctgtaatcccagcactttgggaggcccagtcgggcggatcacctgaggtcaggagttcgagaccagcctggccaacatggtaaaaccccatctctactaaaaatacaaaaaaagattagccgggcgtggtggcatgtgcctgtgatcccagctacttgggaggctgaggcaggagaatggcatgaacccgggagacggagcttgcagtgagccgagatcacgccactgcactccagcctgggagacagagcgactccatctcaaaaaaaaaaaaaaagactctgtctcaaaacaacaacaggccaggcgcagtggctcacgcctgtaatcccaccactttgggaggccgaggccggtggatcacttgaggtcaggagtttgaggccagcctggcgaacatggtgaaaaccccatctctactaaaaatacaaaattagctggacgtggtggcgcatgcctgtaattccagctacttgggaggctaaggcaggagaattgcttgaacccgggaggcagaggttgcagtgagccgagatcacgccattgcactctagcctgggcaacaaaagcaaaactctacaaaaacaaaaaacaaaacaaaaaaaaggcaacaaagttacaaagttataggctgtcaagatttgcaattctttttttttttaatacagggtcttgctctcaaaactaacatgatcagacaggcgctgtggctcacgcctgtaatcccagcactttaggaggccaaggtgggcggatcacctgagatcaggagatctagaccatcctggctaacacagtgaaacctcgtctctactaaaaatacaaaaaattagccaggcgtggtggcacgtgcctgtagtcccagctacccactacccgggaggctgaggcaggagaatctcttgaacctgggaggcagtggttgcagtgagccaagattgcgccaccacactcctccctgggtgacagagcgagactccatctccaaaacgaaaaacaaacaaaaggcacgatcatagctcactgcagcctcaacctcccatgctcgagtgatcctcccgactgagcctcccaagtagctggcactacaggcacacgactccatgcccggctaactttttaaatttttcatagagacaaggtctcactatgttgcccaggctggtctccaactcctgttctcgagtgatcgtcctgccttggcctcccaaagccctgggatgacagggatgagccacagcacccagccactgttgagattcttgaacaacaaggaattagaaactccgggatgggctcgtggagaggcagaccccacagcggcatattcccaggtgaaggaagagtgcctagcacacactgcaatcctccttgagcccccacagagagggaggtgtcacccagagctgtccctccccaaggagagctctgaggaaagcagcagctggacctccatctaggggcaggctctgttatctcggcttcatgtcatcgcctcccctgcctcccctgcctcccaagaaacttcgcatccttgtcttgcgtctgtctcggcttcccatgacaccatcgcacaaacagtgacagccacgcaacaccggcacccgcgagagagtggatgggacgactgtggggtcagggaggacccctgagggcttctccaatacaacggagctgacccatccccttgtaaggtttttcccgcagtgggaggtgggcacttaagatggaatgggagccccaacctctggcggttgccatggtaacctgccaggaagggaggccttgaaaccgggaggggaggcctagaaaccgacatactcttccctggtaagtgtaggggaggggtctggagaagatttggggtgaggggagctgcaaaaggagctgaatttctaatgccctgggggtgcttttagatggctcacatgcctggcattaaactccaggaggtccaactgaaaacttgttcctatattaattatctttccttccggggacaacatctcagcttggggccggtgtgtctctaagcgcctctggaagggctcaacacatgcaggcctgagtccagcctagctggctgggctttcactatgtttatttccatgggatttcctattgattgcaagagagagacctgctttccatgtaaggtagtgaattgccttttaaaatttatctacaaagcttctttacaaagttgccttttaatatttactgaggttcaacaaagtcagtccaagcaggaggtttaaaaaaaaaagcacagggaaagggtggacaatgccagcccggctggctgatttctcatcactgccctctgcatcatggggtagcgtctgcttcggggcccccgggatgaataaagtgagtttcaaggccctcccctcctccttaccaggatgagctccttggctctaggcagcggtgagccaaggctagaggccaaggaggctggactgtccaccaggtcccgacgggcaggaatgcagatgggtacctttccgcagggggtggtagccgggctggggggctctgagggttggtcctgggtttgaggaggtgacgttgagcagagttgaaatgagagggaaagaagagtcccttctctatcctcctcccgactcccaccccaatctctagaatgggtacccatgacccaccatgggaagattatgaaatcttctgctgcctcagtttactcatctgtaaaatgtattttttttttttttgagtctcgctccgttacccaggctggagtaatggcccactgcaacctccgcctcctgggttcaagcgagcacatccagctaatttttttgtatttttagtagagacaaggtttcaccatgttggtcaggctggtctcaaactcctgacctcaagtgatccattcgcctcagcctcccaaagtgctgggatcacaggtgtgagccaccacgcccggcctgtaaaatgggtttaatgataggctctactccataagcacccatagcgaggactatataaaggcttggttttattttcccattgaacagatggggaaaagtgaggccagggaagggggtgtcactgcccacaaatcactcagtgaacctgggcttgaagtcactccctgtgcagtggagaggaggtcggccagaggtgtcccggagtccctgacgcttcctgaccccatcccagctgtcccacagagcggggaaccaggatccccactacctctgggtcctcccagtccagaaaacccaccccttgctctgtgcccagagtcggggaagaggctggacccctggactcacctcgtccaccaccagattgtaatcactcttgtcttcgtcgctttcctgggggaagatgggggagagagctcattgtggtcatgcccctgcctccacaccccctatccgctcctcaggagttggaggcatgagcccagccagccctggggcatgactgggattctcagaccactgcacccgtttgctcatagcagaagggaaggctgcacgtgcccgcatccgggaaggatgtggggaggcagggcaggtgggcaccttgtggagaggactttgaaggatgtggactacatgagtgccctgtgtgactcccggccctctcaggcctcagtttacccctctgcatggtgaggggagagccagagaccagcaatcatccttaccgccttcataaagactccgccttaataaataaataaataaaattcattgccaaagaaaataagactccaccttaataaataaataaataaataaataaaattcattgccaaaaaaaaaaaaaaaaagctattaggtaaaaaggaagatttaaggcttctctgagaaacagcaatattggcccaccctgagcctgccagtctccggggatcaagttgcagctgcccctgtaggtgggagaaggggctccccagctggccacagccccattccccacattcggcctggcccctgggatgctagagttggaaactacaagtgtgcagccgtctggcaatgagaggaggtcccagcctctaggaggtggtcagggaaggcttcttgtaggaggtggcactttgtttcttgatagaaaaatgggtttctaaaacatgtgtgttctagggaaagaaaacagctggagcaaaagctagagggtgggaaaatggctgtacggccaagaggccgcagagacttcaagcaactggagttaagccttgcattacaggatctcctctgattggtcagtactctgagtagtagggagctatgggaggctccggagtgagagaattatggccagagctgggctctggaaggctctgaggggccaggctggtctgggccatgcacgcccatcccagtcctgcacctgcccccactcacataaggtcctgatggctccttctcatctgctctctgcttcccgccaccaccagggccactcggtcgctcctcctccacgagactctcagggggcgagggagatgcactctgcggagagacaaaggccggggggagaaagggtcagggccctgggctcctagattgcattgtgatccagccgagactgagggtcccccaccattattagggtccggacctcaagcttcccatctgggaaatgggagcttccaacggctgactcagtgctaaggttttgttctctcttctgttttgttttgtttttgacggagtcttgctctgctgcccaggctggagtgcagtggagccatctcggcccactgagacccccgcctcccgggttcaagcgatcctcctgcctcagcctccccagtagctgggattacaggcgccaccaccacgcccagctaatttttgtatttttaatagagacagggtttcgccatgttggccaggcctatctcgaactcctgacctcaggtgatccacctgcctcggcctcccaaagtgctgggattacaggcatgagccaccgcaaccagcgccttacttcttctgcaacctctctgacatctataattatttcaaaattaaaccattttggccgggcgcagtggctcacgcctataatcccagcactttgggaggccgaggcgggcggatcacaaggtcaggagattgagaccatcctggctaacacggtgaaaccccgtctctactaaaaatacaaaaaaaaaaaaaaaaaaaaattagccgggcatggtggcgggcacttgtagtcccagctacttgggagactgaggcaggagaatcacttgaacccaggaggcggagcttacagtgagccgagattgcaccactgcgctccagcctgggcgacagggcaagactcagtctcaaaaaaaaaaaaaaaaaattaaaccattttttgaaaaacttactgacacagctcacatgacatttctgttggggagcacccacagatattgctgaacggctgatggctaggcgaacggaagtgaggatgggaagaagggtccaaggtcatgcattcatttatttaattacccgaaaaaagctggaggttgaaatttttttttcttttgagatggagtctcgctctgtcgcccaagctggagtgcagtggcgcaatctcggctcactgcaacctccgcctcccgggttcacgccattcttctgcctcagcctccagagtagctgggattacaggcgcccaccaccacacccagctaattttgtatttttagtagagatatggtttcgccatgttggccaagctggtctcgaactcctgacctcaagtgatccacccaccttggcctcccaaagtactggggttttaaacactacagccttctgggtatctcccacacagaaaggcttcaggaaaccgggctatggatcttgtttttttattgttgtggttgctgttgtttgttttttgagacagagtctcatactgtcgcacaggctggagtgcggtggtgcaatctcggctcactgcaacctctgtctcccaggtccaagtgattctcctgccttgacctcccgagtagctgggattacaggcacccgccgccacgtttggctaatttttgaatttttagtagagacagggttttgccatgttggccaggctgcttttgaactcctggcctcaagtgatctgcccaccttggcctcccaaagtgctgggattacaggcacgcacctggcctggtttttttttttctttctttcttttttttttttttttgagacagggtcttactctgtcacccaggttggagtgcagtggcacgatcacagctcccttcagccttggccttctgggctcaagtgatcctcccacctcaggctcccgagtagctgacacaacaggcatggaccaccacacccagccaactttttgtatttttctgtagagacggggttttgccatgttgctcagctggtctcaaactcctggcctcaaatgattctcctacctctgcctaccaaagtgctgggatcaaaggcgtgagccaccatgatcgacctaggtctcattctgaggcccccatcagctcagaaccagcgttggcctcccaagaatataaaaagagtcccagggtgccactcacttaccctgctcggggctctctccactgacagattgggaatgggataaagagaaagaaggagaaagaatgaggcgtttgtatccacggcgccagagggtacagccctccagtttataaagccccccgcccccaccaccccactcagagtctctctacccttccaacacccttgcaagtggtggattatccctcccctgcattcagatcaatgcccagagagggatagtgacttgcctcaagacacacagcccattgggggtgatgttgaaccccagggccttgcagccgctctcattgatcccctcacactttacgagttggggtcttgctctgttgcccaggctggagtgcagtggcccagtcacagttcactgcagcctcgagttcccgggctcaagtgattgtcccatctcagcctcccgagtagctgggactccaggggcatgccaccatgcttggcatttatttatttatttatttatttatgaatgagacagagtctcactctgtcgcccaggctggacttggctcactgcaacctctgcctcccaggttcaagcaattctcttgcctcagcctcccgagtagctcagattacaggcacccaccaccatgcccagctaatttttgtatttttagtagagacaaggtttcaccacgttgaccaggctggtctcaaactcctgacctcaggtgatctgcccgcctcggtctcccagagtgctgggattacaggcgtgaaccaccgtgcctggctatctatttttatttatttatttatttattttaatttttttgagacagagtctcactctctcactcaggctggagtacagtggcacaatcttggctcactgcaacctccgcctcccaggttcaagcgattctcctgcctcagcctcccgagtagctgagattacaggcacccgccaccactcctgcctaattttttttgtatttttagtagagatggggttttcccatgttggccaggctgctctcgaactcctggcctcaggtgatccagccacctcggcctcccaaagtgctgggattacaggcataagccaccatgcccagcctgtgcttgactaatttttaaatttttcatagagatggcgtcttgctatgttgcttgggctggcctctaactcccggcctcaagtgatcctcctgcctcggcctcctaagtacctgggaatacaggtgtgcaccatcccacccagcaaatttttaaatttttgtagagacggggtctcgctctgttgcccaggctggtcatgaactcctgggctcaagcgatcctcccgcctcggcctcccaaattgttgggattataggcatgagccacttcatcccctcacgctgatgtttgctaccctggactgccagtcgtcctccccagccccgtctccccagccaatgccaccccgtgctgcccactcacctctggacccctcggcctccacgcccgcacggtcctccttgacagccgccgccagctgagcctgggcagccagggctccagacagagcaagcagccccgtagcactgccgcccaccagcccggctgggcggggggtgaggggcacagggggtgcgtggtgggacagcggctggagctgctgctgctagaaaggaggcaggatgggccggggcggggggcggcaggagcccagcggtccccagcccaagaggtagacacaggggatgggacctaagcacagcatgtgcccctggggttcccaggaccactggagccaaggcccacacaccaccccagctttaacacctcctgggtgggtgccagggacctgggagtgggcgtctccccatggcggggcaggggctagagagactcaccccgatgaggctgttcagctcccccacggtgacctgcttggcgcgttctacggcctggagcacctgctgctgatgctggcgggtggaagggatcaggtagagggtacattgagcccctgctcatgctagcggtgcccttggggacctgacctctccccgccaccctctcatctttgccccggtacttcccatttctcttttatctttttccctctcactctctccctttccttttggaattttgaaataagcacacggagaaagaaaccaaacctaagtgcaggtagaatagttacaaatcaggccgggcatggtggctcacgcctggaatcccagcgctttggaaggctgaggtgggcagatcacctgaggccaggagttcgagaccagcctggccaacatggtgaaacacctgtaatcccagctactcaggaggctgaggcaggagaatcgcttgaacccgggaggtggaggttgcagtgagccgagatcgtgccaatgcattccagcctgggtgacagagcgagactctgtctcaagaaaaaatatatatatattacaaatcacagtctctcctttggagcatcgaagaaccaaagacatctggggctggattgttctctggggcggggctgttccaggcactacaaggagccgagcagcatccctggcctccacccactccatgccaggggcacccccagttgtgacaaccacagacgtctcctggtggtaaaactacccccaagaaaaaaaaaacactgtgataaatcggcaccatggacccttctcctaggttaaggaacagaaagtaccagactccaggggccccctacactccctgccatcagaacaccctccctcctccaccttcatgacaataatttctttgtttttctgtataattctgcctcctacgatcgccttcctaaacctgcgtggatttgtccgttttcaactacgttgtgggctcattctctgagttctctttggcatctggcctctcagcataacattttaagcttcttccatgatgtggtgggtggcggcagcatattcagctttcagagctgtgggactctgctgcgagaaaatgttatatctgagccgggcgcggcggctcatgcctgtaatcacagcactttgggaggccaaggcaggtggatcacttgaggtcaggagttcaagaccagcctggccaacatggtgaaaccctatctctactaaaaatacaaaaaaaattagccagacgtggcggcgggtgcctataataccagctactcgtgaggctgacacaggagaatcacttgaacccaagaggcacaggttgcagtgagccaagattgcaccactgcactccagcctgggagacagagtgagacccagtctcaaaaaaaaaaaaaaaaaaaaaaaaaaggggggggggtgctgagcgtggtgactcacacctgtaatcccagcactttgggaggctgaggcaggtggatcacgagatcaggagttcgagaccaacctgaccaagatggtgaaaccccatctctactaaaaatacaaaaattagtcaggcatggtggcatgcacctgtaatcccagctactcgggaggctggggcaggagaaacacttgaacccgggagttagagattgcagtgagccaagatcgtgccatgcactcccgcctgggtgacagagcgagactcagtctcaaaaaaaaaagaaagaaagaaaatgttgtatttttgctgttccacacagaagccactggccatgtgtgtggccaccaggcatttgacatgtggctggtgcaactgatgaatagaatgattaattttattaaatttaagtgaatacaagtttaaatataaaataaatttaataggcttatttttatttttacttttttgagacgtagtctcactctgttgcccaggctggagtgcaatggcatgctcttggctcactgcaacctccgcctcccaggttcaaacaattctcctgcctcagcctcccaagtaggtgagattacaggtgcgcaccaccacacccaactaattttcatacttttagtagagacggggtttcaccatgttgaccaggctggtcttgaactcctgatctcaagtgatttgcccccctcagcctcccaaagtgctggtattacaggtgtgagccactgcgcccagcctaaatataaatttaaatataaaattaacttaatagatttcaggtcgggcgcagtggctcatgcctgtaatcccagtactttaggatgctggagtgggaggattacgctagtccaggagtttgagaccagcctgggcaacatggtgagactccctctctgttacattatacatatatacttatttaagccggagtctcactctgtcgcacaggctggaatgcagtggcgtgatctcggttcacgctaacctccgcctcccaggttcaagcaattctcctgcctcagcctcccgagtagctgggattacaggcacctgccaccacacccagctaatttttgtaaaaaaaaatttttttaggccaggtgcggtggctcacgcgtgtaatcccagcattttgggaggccgagccagatggatcacctgaggtcagtagttcaagaccagcctggccaacatggtgaaaccacccccccaccccatctacaaaaatacaaaaactagccggcatgatggtgggtgcctgtaatcccaactactcgggaggctgaggtggaagaatcgcttgaacccaggaggcagagattgcagtgagctgagatcgtgccattgcactccagcccgggcgacagagcaagactctgtctcaaaaaaaaaaaaaatttttttaaggaaaaaaataatagatttaaatattattaatagttaacctaagtgtaaatgatcacacggggctggtgactgccgtgtaggatagcggaacagtagtatattccactgtatgcactctgaggctgcttgtgtatacacgctcctgaagacagacatctgggctgtctccaccaaggaggtatcaggatgcggatacagagctcccatgggggtgcacctgtgtgtgggtgtgtgtaggatgggttggaagactttctagaaagggccagagagtgaaaacattttccctctgcaggccagaggtctctgttgcaactaccaaactctgtcactgtaatgggaaagctgctggaaatgatatgtacatgagtgggcgtggctatgtcaataaaactttatttgcaaaaacaagtggaggggtggagctggccctcgagctgcagtttgctaattcctggaaatgtgtgccttactcattcctttcaacagtcattttacctaatcttttttttttttttttgagacagaatctcgctgtgttgcccaggctggagtgcaatggtgcgaactcggctcactgcaacctccaccccccgggttcaagcaattctcctgcctcagcctcccgagtagctgggactagcccagctaatttttgtatttttagtagaaatgaggtttcaccatactggccaggtgggtctcaaactcctgacctcatgacccgcacgccttggcctcccaaagtgctgggattacaggcgtgagccactgggctcggcctacctaaacttcttgcggctcttgcctttctctagaccacctcgtccccactttccgctgcagatgctctttatgttctgtgtctacacaggacctctccccaccccaagcttccagaaatctcagactcagtggaatctgaacaaactgagcatctcccctctgggtttggtcctcaaggcatcaaggatcctcccagtgtatccactctgaagtagaactatctttcacgtctctctgaagagagaacgtaccacacagaaacagggacagtgcaggctgggtacagtggctcacacctgtaaacccaacactcggagcctgacacgggcggattgcttgagtccgggggttcgagaccagcccgggcaacatagggagacccgtctctactaaaaatacaaaaattagccgggcgtggtggtgcacgcctgtaatcccagctactcaggaggctgaggcatgagaatcgcttgcacccaggaggtggaggttgcagtcagccaagatcatgccactgcactccagcctgggtaacagagcaagaatccatcacacacacacacacacacaaaagaaaagaaaaagaaaaaagaaacagggactgtgcaaaggtactgaggatgaaaggaacctggggcactctcagaagagctaactttttttttttttttttttgagatggagtctaactctctcacccaggctggagtgcagcggcgcaatctctgctcactgcaacccccgcctcctgagttcaagcaattctattctcctgcctcagcctcccgagtagctgggattacaggcaaacaccaccatgcccggctaatttttttttttaagttttagcagagacagggtttcaccatgttggacaggctggtctcgaactcctgacctctggtgatccacctgcctcagcctcccaaaatgctgggattacaggcaggagccaccgcacctggccgaattacagtccattttaaccatttgtaagtgcacagctcagcagcataaagcacacacacggttgtgcagccatccccagcaccatctccagaattttcccatcttcccaaactgaatttctgtccccataaaactctcactccccgtcccctccccaacccctggcaccccccattctgctttctgtctcagtgaacctgacgaccctgggacctcctaggagtggatcacccagtgtttgtccctcagtgacttcttctagcaagacggtagggttaactttcatcaggtgctgagtaagcgtacccatcatctccagcaccctgggtgtatgagctcatctcaacttcacacctacgctactgaaaaaacagagacaagtgtcctgcctgaggccacacagccaggattcagacccaggcagccaacttgcagggcttgagggggtcagctctatgccttgcttcccatcaagggggaaaacagcccccagtcctcaccctcagccaacacctccctccatccctgcagcccctgccccagcgggatgcctggcctcagggctgcgggactactgcagtgaaaatggtctctatccgtgctgcaggctacgcggcagaatcagtgcctggggcgtcctcgcccagacctaccccctcccgtcttcttccggctcccttcccctcctccccccacccccaggcccactcacctcctgggtcaggaaggggataatctgagcgcagataccgctcagacgcttcacaatctccgcctggcaggaagcaatgagaggaagcttggagcggggtagagatttgcaacccagctctggactcccaggcggaccaggtgttggcaaagccgaagggttggggaggtgacgcccgcaggtgcacagagggaactcaggctagcatggcatgggccgaggtgggattcagagccccaccaggctgcgtgctcagctgagcgaggcccagggtggcctggagctgggaagaccagggctgaggtcctacgagtcacagatacaccacccgccagacgcacacccgccagggatttgcaggaggcagacgctcagacacccaactcagacgcagacactcagaggtgctgggctcagctgaaacaaaggaaaggggcctccgcctggagtcccagattccagccccggcttggcccacgtctgtcccaggcaaggcccctttcttggtctcctccgcttcccaggactgatctaccagctggggatgcctccaggtggagatctcagcacgccacactcaagggaaggatttcatctggagagggtctgggcccaggtgccccaaagaggctgagcagacgagaaggcgtgtgggtggggaagggggcgggcatacaatggccacggactttgcctctgcctgagttacaggtgtgctgtgtgtctggcgaagtctgtgtctcctattcccaccaggagggtggaactgggatcccagggtgtcccgcaccccataaaggggggtctattgcgtggacccatgggaccacgccatgcttcagcagacaagccccctcctgcccacatcagaaccaacagaacccccacacatgcaggaaagcatgccagggtgggcaaccccaggcaccccacactcccagcccacccccttctccttcccagccaccgggaagtcccaatacaaggttctgctcattgattctaatattctgatagaatctaggagcccatgaagctcagaagtttgggacccctctcatccctttagaaaccactggccagtctcaggatctcaggattaagcatggaccactaaagtcaattttagaatctttgggtctattggccgggcaaggtggctcactcctgtaatcccagcactttgggaggccgaggcaggtggatcacctgaggtcaggagttcaagaccagcctggccaacatggagaaaccccgtctctactaaaaatacaaaatattagccaggcatggtagcaggcgcctgtaatcccagctcctcgggaggctgaggcaggagaggcgcttgcactcaggaggcagaggttgcagtgagccaagatcaggtcattgcactccagcctgggcaacaagagtgaaactttgtctcaaaatttaaaaaaaaaaaaaaaaaaaaaaaatctttaggtctatctcagaaccttgagatcagaagttcgggaatagcctcagaaccttttaacacatctcagcacatagatatgataatcgcagaaccctgaggtctatctctgaaccctgaggtcaatctcagaaccctgaggtctatctctgaaccctgtctatctcagaaccctgaggtctatctctgaaccctgatgtctatctcagaaccctgaggtctatctctgaaccttgagatcacaagttcaggaacacctcagaaccttttaacacatctcagtacacagataggacaatctcagaaccctgaggtttatctctgacccttgaggtctatctctgaaccctgaggtctatctcagaaccttgaggtctatctcagaactctgaggtctatctctgacccttgaggtctatctctgaaccctgaggtctatctcaggaccttgaggtctatctcagaaccctgaggtcaatttcagaaatttgaggtctatctcagaaccctgaggtcaatctcagagccctgaggtctatctcagaaccttgaggtctatctcagaaaactgaggtcaatctcagaaccgtgaggtctatctcagaacactgaggtcaatctcagaaccctgaggtctatctctgaaccttgaggtcaatctcagaaccctgaggtctatttcagaaccctgaagtctgtctcagaaccttggatcacactgagaagctccagaagaggctcagagccttacgacactggagtcaatctcaaagccctgaagacagccacagagttttgaggtctattttggagtagtggggtcacagtctgaaccatggcatcaaattcagggcctggagaacaatcttggaaccttccagccaatcacactgagaccaatctcagaagcttcaaagcagcaacagaacctggggtccatctcaaaacttcagactttctgggttgaaagggacctctaagagtggccatccagctccctcctaggacagaagtcacttccacagcctccctggcctggctgccctgcctctgctatgtgccctccttgatggggatgcctggtggcccctgcccactgcctgcatctctgctggacgctccaactgctagatactgtcttcagaaggtgggactcattttccttccacgaggctgaaatctgtcttcctggtcccagatgggccctctgtgacctctgcggagatttcaggatgagacccgtgttccctaggtctgctctggccccggctgcccactctgggtccttctcagggcttccagacccccaccctccctcctgaacacgcgtaaccccaacccagttacctgcttatgcatttcaatgttgagcccgtacgacatctcataatactgcaaaggaaaaaccaagtaagaacgtctagggtggagatgggtgccctcctccagataggtgatgccagggtcttccaagagtccccaggttcaggggaatcacagcaggaagcagagccccccccagctccacggggtcccagaggaggaagcgggggctctgcctggaagggccccctctactctccccagagaggcagggcaggtaggaagtgtccagaggccctggcccgacagagactcccatcaggcgaggggtcctccctgtctccccattcccagagctgggaggaccctcctagagagcctgaaatcccaacctgcccaatgtacagacggggaagacgaggttcggagtggggcagggacctaccccagagtccaccgtgactcaaagccctgcccgcctctcccctcaccctggcatcataagtgccctcaccatgacataatgtcgctgcatttccgtcttctcgctggccagcttctcacattctagcttgaggctgagaagaagagagagggcaaggggctcccacccgccccatgtgggccggcttccaaagtgagaggctggatctccccctcccgacttccttacagacctccccccacctcctgtcccagtccctccccgccccttcctgggctccaaatgccccagctctgactgtccccagacccctctgcacctgcgcttccacctggaggcctttgtcgcgccccccctccaaccgggagcccctcctccccgccctataccccggaggcctcgccccgccccggcgcccaggtgaactcccgcggcccctggggcggcccccctcacctgtggtattgagcctgaagaaactggaattcttctttgatgcggtcgcagatctccaagatcgagaacttgaagggctggccggactggagcggggtctggggggggtgtgggggaaacgtcagggtctgagttcccggacactgggggccccctccccgcagtccgcactcaccgggtgccttccctgggggtacatcctgccgatccgaaaagccccccaggcgccaccagagcttgatgatatggaggcggcaagagtgggggaggctgaagtggggtggtggggaggctgcccgaagaaagagggaggagggagaagcggcgcggggcaagggaccctggagtccctggcgcgcccccaagcgcgcgcgcccggggtcgtgggagcccctccccgggttggggtgcgcggggcgagcggggcgggcaggggcagcggccggggcgggagcgcggcgagggcggccgcggcagccggcgcagaaggtcgggcgcgccgcggccgggtttcggtggcggcggcgcgggcggcgggccccgcgcggagccgcctccctccggcggggctcggccgggagccgcgggctgagccgccttaaggtggcgccgccgcccccacgcgcccgcggcccgccccgcgcccacccccgcgcaccgcccctccccgcgcccgcgccccccccggcccccgggcacccgcccccttccttcagtccctgggccgttggggaaactgaggccgggtggggaggcgcccagtgccttaaaacagggtccccaccccctcccggaggggcgggagaagaaaaaccagtgaagaaattcacaccgtgttacccaccgtgggagcgggggggggggcttgcggggagcggggaccagtctggagtcggaaatggcttttctgagcaagtgacattgggttgagattgaagggtcagcaggacgcagccttgccaagcgctggcagggaaccctgccagaaagggaatctcacagcaaacactgcttcccagatcatgccgggccctcgccctctgggggcctcagtagtctctgcaaaaggtcaggggtggtgcgctatctttagggtttaattttttgcagagatagggtctccctgtgttgcccaggctggagtacagtggggcaatcatggctcactgcagcctcgaactcctgggctcaagcgatccttccccctcagcttctccagtagctgggactacaggtgtgcaccaccacgcccagctaattttttaattttttgcagagatggagtaggggggcgtctcactatgttgcccaggctggtcttgaactcctggactcaagcctctctcttcggccttccaaagtgctgggattacgggcgggagccaccgcactgggcactgcacttaaatgagatagtgcatgaacgctgtcagcctctccctacacagagcaaacttccacagatgggaattgtgttcctactgccatcaccagtggactgggctgtctcccctctcagactgggtttcttgaaggcaggagccgtgtcccactcagaactggaagaaccacagctctgccatcagactcaagtctctcccacggcaaaggctccagccccgaccagagaccacagacatccagccagcatccttcaggcccacccggggagtgggaagttcttattctctttggagaaacctcaggagaggtttgtgaagtcaatcaacaaacgtgtactaaatgcatactgtggaccacacactgctgtagacactggggcacagctgggaacaaaacagagaaaaatccatgccccttgatgacacttggacttgtgtccttaggtgatcgagtacctaatggtacctaagggttagggttacaaaaacccattttgtacccttacaaaagggcacaagagcccttatcaatgggccaggggtggtgggtcatgcctgtagctccagcactttgggaagctgaggagggaggatcgcttgagcccaggagttcaagaccagtgtggacaacaccgcgacaatacaaaaaaacatttttgtgttttttgtatctctacaaaaaatacaaaaataattagccaggcatggtgatgcacacctgtggtcccggctacttggggggctgaggcgggagatacctgagccccagaaggtcaaggctgcactgagttgagatcacatcactgcactccagcctgggtgacagagcaggaccttgtctcaaaaaaaaaaaaaaaaagcccttatcaaatttaaagccatcgttttccagcccacagatatttacagagcacctatgacgtgtcaggcatccttccaggcacagggattgtaagggtggataagggagacagatccctgccctctctgagtttgtgggatgtgagtgacaggctaggcaggttcacagcttggtaattatgggactatttgtacagacagaggaagagtttagagggcagtgatagagatgaacaaaagcaaacctgcttatgtggggtgtctgggagaggacccttgggggagggtagccttggagatgagacctgaacgatgaggttgggcagctctgggaagggaggaaaagagacacagcctgggataaagatacaattgtgtgtgtgtgtgtgtgtgtgtgtgtgtgtgtgtgtgtgtgtgtagtactcactagctccctattgccctcaaaataaatccaaactcatctctcttcccacaaggctcttcacaaaactcttccccttttccccttcaccatctctttatgttttgtttattgtttatagagacaaggtctcactgtgttgcccaggctggtcttgcattcctgggctcaatcgatcctcccacctcggcctcccaaagcactgagattacaggcatgagccactgcacccggccagccagcttcatgatctcaactccggtcattttcgccctcactcactctgcccaagtcacactggcctcacaccaggcacagtccagcctcagggccattgcactttctgttccctgtacctggaatgcttttcccttgcttcttatcattcaagtctcagctcaaaagctacctcctcagaacggcccctcctagccacccatttcaacagcttctgcccaccccgttattttcacactctccatcctattctccctctcttcccagctcctaccatagtgtgtggctttttgtttgtttttgtttttgttttttgagacggagtcttgctctgctgcccaggctggagtgcagtggcgcgatctcggctcactgctgcaacctatgcctcccgggttcaagcgattctcctgcctcggcctctggagtagctggtattacaggctcccgccgccatgcccagctaattttttttgtattattagtagagacggattcaccatgttggccgggctggtcttgaattcctgacctcaggtgatccacctgcctcggcctctcaaagtgctgggattacaggcgtgagctaccatgcctggccttcggtttttttgtttttgtttgttttgagacggagtctcattctgtcgctggagtgcagtggcgtgatctcggctcactgctgcaacctctgccttctgggctcaggtgattctcctgcctcagcctcccgaatagctgggattacaggtgcccaccaccacgcctggctaatttttatgtttttagtagagaccggctttcgctatgttggccaggctggtcgcaaactcctgacctcagatgatccaccctccttggcctcccaaagtgctgcgattacaggcttgagccaccgtgcccagcccacagtgtgttttggatgtgagtatgtttactcggaggttgttcgcgtccttgtttgtctccctcaccacgaagaaggctgtggagggactgagcctgtctaggtctctgcggggcctggcacacagtaagtgctcaataaccagcctaaagccagaaaccgccggccacactccctgcttggaaattctcacaaacagggagcgccatcattctacgctgtcaagagtccgtgattccaggttcttgggggtctgtgaagtgctgattccaaaccctttccggcaggtgtttcactgctcctgggaggccaacatctcccctgcctggaccttgagcatacatggtagcctctgtcctcattgtctgcaactgtccaccccacatcttccttcttgttggttgttttttttttttgacggagtcatgctctgtcgtccaggctggagtgcagtggcacgatctcggctcactgcaacctccgcctcccagtttcaagcgattctcttgcctcagcctctcaagtagctgggattacagatctcggctcactgcaacctccgcctcccaggttcaagtgattctcctgcctcagcttctcgagcagctgggattacagacatacaccaagcctggctaatttttttttttaatggagtctcactctgtcgcccaggctggagtgcagtggtgccatctcagctcactgcaagctctgcctcccaggttcacaccattctcctgcctcagcctcccaagtagctgggactacaggcgcccaccaccacgcccagctaattttttgtatttttagtaaagacagggtttcaccatgttagtcaggatggtctcaatctcctgacctcgtgatccgcccgcctcagcctcccaaagtgctgggattacaggcgtgagccaccgcacccggctaatttttgtatttttagtagagacatggtttcaccatgttggccaggctggtcttgatctcctggcaggcgatctgcctgcttcagcctcccaagtgctaggattacaggtgtgagccaccgcgcccctccagatcttccttcttctgcctaagcccctggctctggaaacccaatggctccttcttgacctccattacaatgcttgctcagagcagcctcacctccctctgcggggctctcctgtccgggcggccctcttccctctctaagcacaggtgtggtggctcaaacttgtaatcccagcactttgggaggccaaagaggccaggagtttgagaccagcctgggcaacatagcgagacccaacccccaccccccatctctacaaaaagtaaaataacaaacgtaggtctctgtccttccttagcccggtcacttgaatgtcaacttgactcacacctctggcttccagggctctgagacaccgcctctccctccaggcttcagtgaccgcctcgtgaggatggctgcaagctctggcaccacctccggttcctactctgagacccagccctgtgggtccagccaccaactgggcatctcccctagaggtcccccagatctcagactcttaccccctgctcctatcagggttcccacacacatcccccagatactctaaaccagagcatcaccctagccctctattcccaacacctggcctgcaaccctcctccgttctccccaccccagcagcccccaccctgaccaggcctttgtcctctctcccatctggaccacagccacctcctccctctgagcagcctttgtttttggtgatcttcaattggagcctggccctccttccctcaaaccctcccctggctccctattgccctagggataaatttccagctcttcaccctagcactggaacctctgcaaccctgccccagccagcttcaccttcctccaccagatcacaccacacccccaaccccctccagccaccctggccagatcacctaatttgtgtcctttctttcccacctctgagcctttccctgcttgttatctcttcctggaattccctccccctccttttatgcctggagaaagtccatttttttcaaggcccaacccaaaaactgtctcctgcaaaagccttctcccccagcctcctgtcttcttcgcctcctgtcttctccatacgcgcgtacacacacacacacacatacacacactggatataaactgcttggtgttggtggataaatggatgtttagtctacgaacacctccacatgctgcaagaggctggattcctagagaagatccagccctaggccttccagggaggggctcccagagcatctggtggggacagaggtacagggacacgtaccctcccagggtcacatagggtcagtgtcagcacaggagcgagctaaggatgaaggcagagccgggcgaggaacaggggcattgcccggtgagtgagctgaggctccctagagcaggggatctttacccagcagtcttcagatccctctaacaggcacactgcaccggggagggtaaatacagatttgtggattgcccgagaagccacaagaccacacacgcacacaggaacacaccccatcccttagtgtgtgatccgccaggaaggaggagtttttgctctgggcagcaacatccccaactttgggagcagcgggtggaatttggggagactctgctgccagcaactgtgtgcatactggggaacccttggccgcctgtgactccataactccccaaaataccacatccggccagagcaggaagcagggaagcaacctgccaggcgtgttccaacgtgggtagagtccccagcgacttcatttgccacgcgggacttcacggaccccctctttgcgcctcagtttccccagctgcaccatcagggaagaagctgccagaggggaaaaggagctcagccgccgatctcccccttcccattacagagaggctcagcccctggttcctggctagggttttacgttgtggatgtgggtttacggaaaaaaaaaaaagggaaaaagctgagaagctgcgctgggaccccggattgctcagaccaccttaaatcagcctggccgccccagctactgtggaaattcctttctccgcggtggttggctgggggcgccagccaatccgctcgcgacgctcccacatgggtcagtgacgtcacataggaaactggccaatggggattaggagaccagcaaccaatggcaggaggcactgggatcagtagggccaatcggaaggcagctcggcgctcccggcggggtttggcgagtgtggcccccctccctaggagaatctgagaccctagtggacgcccgagctcgaccggattggaggagggggggctaaggctccattattatccagaaacaggggaaagcgagtcacccccaagcctggcctatctccccttcaaaacaagggaccctcgtgcaatatgctaccagctagctggcggagcagaggttgcatctttctccctatttcacagataggtaaactgaagcaaagagtagttaagtcacgctggacgcccggcgaagagctgaagctcttacccgagcctgggggctccaggaacggtctcagttttacccccaggtgggggggatgggcctataggtagtcaggggtggaggggggtggtgctgggccttgtgcctcagtttccccgagcgtggaagctggaggagagcacgggttttcagaaaaagactacgattcccagaagctcccgcgcggctcccgcccaggctgtcaatcaaagtaacgtgggtacctctccggcccgcgctctcccgcccgtcgcctccctcccgccagctcccgctccctccctgccggctcccggcccggcgcggtataattacagcccattgatccgacccgggccgggaaagcggctccctcggggaggccaagcctttggcttccgacaccgccaacctctgcctaccgccccctccagccgaactgccgggccaccagccaggcctgtcccctcccgctggccccgggctcgcgggtgacctctgagcctcagctccccgccacgcttggcggtgtgccccccggaaaaatcacacacacatttccttccacccaggaacatgaggagccatctccctagaacctccagggcctctctttgagcctcagtttacccagatgcacagtgagattgctggacaaaactttcatgaaacccatactccgtgctgttctgcctgggagcagccagggctgaccttggtggaaactcaaggaggggctcccaagtttgggaggagggggagacagcccagctctctcagaacccctgtggtcggggttggggttagggaggatcagagctgggggtgggagtgggggcaggctcagccaggatttagcgcccccattgggaagttgggatagctttctagatgttgggtggtagtatttaatagatgttggggcagggcgtggtggctcacgcccgtaatcccagcacttcaggaggccgaggcaggcggatcacctgaggccaggagttcgagaccagcctggccaacatagtgaaacccggtctttactaaaaatacaaaaattagccggacatggtggcacgctcctgtagtcccagctactcaggagactgaggcaggagaattgcttgaacctgggatgcagaggttgcagtgagccgagttcgcgccactgcactctagcctggacaacagagtgagactctgtctcaaaaacaaaaacaaaaacaaaacaaaacaaaaagatgttgggtttcggtatttaagctagggttttgcagaatgcataggagttgcctcatttgagcagtgcctttagattaccctaaccctaagtggacagaagaaagatggggcagccttaagccctttcctgtgacagagtgagccttgggctctgacccctagctttgctgtgtggatctgggaacatcccccagctgtgaagtgtcggggaggtagataccccctagggttagaaggcccctgtgcctactttcgcatgggtcctgaagtcacagtgggttctgaccagcaggagtcagggcctgggagcccgtggtaggaggcactaggattggctgaggggctcaggaactccagcctctccctgagtaagaactgggcggctgggggagaagtcccagagtgacaacggctcagtgccaggcacgtttactctgcttgggtttccttgtctggaacacaagattaataatagaatcttcaaataaggcctataaagtacttacaataatgcatagtaggccgggtgcagtggctcacacctgtgatcccagcacttagttgggccaagatgggtggatcacctgaggtcaggagttcgacaccagcctggtcaacgtggggaaaccccatctatactaaaaatagaaaaattagtcgagcaaggtggcacacgcctgtaatcccagctactcaggaggctgaggcaggagaatccttggaacccagaaggcggaggttgcagtgagctgagatcacaccactgcactccagcctgggggacagagcgagactctgtctcaaaaaaataataataacaataacaataataataatgcatagtaaatgctccataaagggtagctatttgtactcccaacatttattttgtccttattattatttgagacaaggtctcactctgtcacccagtctggagtgcagtgccaccgtcatagctcactgcagccttgacctcgctgggctcaagccgtcttcctgcctcagcctccggagtagctggaatcacaggtgtgtaccaccacactcagctaatttaaaaaaaatttttttgtagagacagggtctcactatgttgcccagactggtcttcaactcctgggctcaagcagtcctcttccctcagcttcacagagtgctgggattacaggtgtgaaacactgtgtccagcccccactatgtcctaaagggtccttctctcccactctcccctcacgctccacatctatgctatgcattctccattgcacccacatccttgatgatccattgaaatgtgaatcagggctgggcgtggtggctcacgcctgtaatcccagcactttgggaggccaagatggagggactacctgaggccagaggttcgagaccagcctggccaacatggtgaaaccctgtctctactaaaaatacaaaaattaaggccgggcgcagtggctcatgcctgtaatcccagcactttggaaggctgaggcgggcggatcacctgaggtcgggagttcaagaccagcctgaccaacatggagaaaccctgtctctactaaaaatacaaaattagccagggtggtggcgcatgcctgtaatcccagctacttgggaggctgaggcaggagaatcgcttgaacccgggaggcggaggttgcagtgagctgagatcgcaccattgcactccagcctgggcaacaagagcaaaaccacgactcaaaaaaaaaataaaaattaaaaaaaaaaaattagctgggtgtggtggcgggcacctgtagctgcttgggaggctgagacagaattgcttgaacccgggaggcggaggttgcagtgagctgagaccgtgccattgcactccaggctggccaagaagagcaaaactctatcctttccccactccaaaaaaaaaaaaaaaaaaagtgaatcagagtccatccctcccttgctcaagaaccttccatagctccctattgccctcaacataaaatccaaactccctacctctgtctatgtgatctgacttccatcgcctccctcctctcacctcctcccacttctccccctctgttccagccacacaggccttctccctcttcctcaaaccagagtctagcctcaagacctctgcactgcattggttgttccctctgcctgaaccacggccagcctttctcttcctttcagatcaaacatcacatcctagagaggccagcctggctagagtagctcccctcctcctacctgctcagcttccctcagtcttccgaggcctcgtggctctgggaacacatactatctgctccctcctgtgtgtacggtctgcccaggccccaacacaccaccggctacactgtatttattgggagagtaagtggacaagcccatagagggatagagcctcaccaaggtcacccagcatgacggacgcgatgccaggtcccctgctaacctgcccagcgctaacacaacctgtaggggtcagctgagatcgcagagatcacactacctccagaggctgtgagacccagtgtcactgatgtgcaagcctgggttcaaaccccacctccgccactgcgtcactgtgatcctgtacagtgggataattatagaaacgtctcattgagtcatcacacgatcaaatagctcgatagatgaaaaggccccgaccgttattattgtgtgggagtgtgtgcggcccagcggggacaatttggggtgcggaagcagagctggggctggcaccacagacaaaccccatttttaagcccctagggccttctggtcattgcagcaaccccatcacccacaccacgtgtaacccctctgtacccagttgggggttcaccctcctaggatcgccatggactcccgtctctatctccaccctccctccttccctggagagctcattgctgggccccaaactcgcccagcctggtccccctggaaggcacagcacagatgggggttgaacaaacccctggccgcatggcccaatctgaatcttctttttaacgtttgtttgttttttttttaagacagtctcgctctgtcgaccaggctggagtgcagtggctcgatttctgttcactgcaacctccacctcccgggttcaagtgattctcctgcctcagcctcccgagtagctgggactacaggtgcacaccaccatgcccggctcatttttgtatttttagtagatggggtttcaccatgttacccaggctggtttcgaactcctggcctcaagggatcctcctgcctcggccacctgaagtgctgggattacaggcgtgagccatctcacccggcacagcattttgttttttgttattgttttaagacaaggtctcactccgtcgcccaggctggagtgcagtgacatgatcacggctccctgcaagcctcgagcaaaatcctcccacctcaacctcccaagtagctgagaccacaatcgtgcaccaccacgcctggctcatttttttagattttgtagagatggggtcttgctatattatcgacctcaatctgaatcttcctcatccagtttctggtttgcagtgagaccttttaacccctgtggacctccgtttgctcatctggaaaaggggcatggtactgtcaccaaccccagagtggcccttgatgacagcctctgctgccatttatatatatatatatatatatatttttttttttttttttttttttttttttttgagacagagtcttattctgtcgcccagactggagtacagtggcgagatctcggcttactgcaacctccacctcccaggctcaagccatcctcctgcctcagcctcccgagtagctgggattacaggtgcgtgccaccacgcctggctaatttttgtatttttagtagagatggggtttcaccatgttggccaggctggtcttgaactcttgacctcaaattatccacctgcctcagcctcccaaagtgctgggattacaggagtgagcccccgcgcccagcctgccattgctattatcactgggctacctggttgatatacacaccatggccctccgaattatgggctgagagcttgccctgtgatgggtacagtgccgcctccaggcttcgccaccgggattccctctgcctggagcacccgcccctccctgagagccacctcccaacatgggctcttgctgtcaaaccctcctcggctcaaatgtcacctcctcagagaggcctcccctcctctcctgggccaagcagccccgtctctctctgtcaccaacccttgctagatttttcttcctaccacttggtgttctctgcaatggtcttgacctattttccaaaccttccccatgactctgtgagctccacgagggtcgagaggcgctccgtctgggtccgtgatacccaagcctggcacacagtaggcgcccaataaatacaggaatgaaaggcccgctgctgccccaggttggtttttcttccccaccaatccagttgctgggaattgaggctttgggggcagccaggcccagagaggcctagggacctgcccacggtcacacagccacgcgctccagctgggagctctgtggctgcctttgcggggggccccgagtcccagggttgggcaggcctagggcagggtcgcccgccccctcctcccgcggtgctgcgggggaacccaccattagccacgcgggcccggcccagcgtgttccccgacaggcccgggcaggcccagcaggggagtgaggggattgcggggagtagggggagcgcagggagcgtggggaccgcccctccccgggacccgagaagggggtgtaggagggaagaggagggggaggaggagagaatggaggaggaaacggagggacaaagggggaggcggcaaaggggaggggaggggagaggaggggagaggaggaggcccccgggtggaggggaccctgtggaggggcagggaggaagggggggcggtgaggtgcgggggaggggcagaggggcggaggtggcgggagagggagggggcggaggagggacgggctttcaggcctggcaggctcccagcaactgcgggaggggtaagggggcctgggaggacggtgggcctgggtgggtgggagaggtttgcagggggaggtcagcggctgggggcgggagcggggacggggatggtagggagggaggcgccaatgaagagatccagggaaggttaggggacccaagctggagactttgaaggacagagggagaagcccagagatggcagaaagagggagacgagaccatcagagacccccgagacagagggggcgaggcgagggagattgttggataatctgtttcaaacctgagttctatttgcttcatattaggggtttgtcccttctccccaagtccccagagatcctatgtagaagctgttctcattaagcaccaaacagttaagtccattctccagtactagctcggaagtcggtttcatattcgacttaacaatttaaatgaaaggaaattttttttaacggcagtggggacttggagaaggagggggacaaagacagacattacccaggagagaaagttagaggggaatcctaggccctcagaggggaaaccaggcaggggcggtttcagctcccttctctagtttttaattaatttattttttattttttagagacaggggtctcactgtgtggcccaggctgctctcaagctcctggcctcaaatgatcctccctcctcagcctcccaaagtgctgggattacagccatgagccatcttgcccggcacagctttttgttttttgttattgctttgagacaaggtctcaccgtgtcgcccaggctagagtgtggtggcaagatcacggctccctgcgaggctcaagcaatcctcccgcctcagcctcccaagtagctgagaccacaatcgtacactaccatgcccggcctggcctcaagcaatcttccagcctcggcctgccaaagtgctgggattataggcgtgagccatggcacccggccccttctgcagctttttttttttttttttttttttgagatggtctcgaacgcctaacctcgtgatccgcccgcttcagcctcccaaagtgctgggattacaggcgtgagccaccgcgccatgcctggcctctgcagcttttaatatcagaaaacatctacctgggacctgcatcatgggtcgcacctgtaatcccggcagtttgggaggccaagacgagcggatcatttgaggtcaggagtttgagatcaacctggccaacatggtgaaaccccgtctctactaaaaatacaaaaaaaaaaaaaaaaattagccaggcatggtggcgggcgcctgtagtcccagctactggggaggctgaggcaggagaatggcgtgaacccgggaggtggagcttgcagtgagccaagatcgtgccactgcactccagcctgggtgacagagcgagactccatctcaaaaaaacaaaacaaaacaaaaaaattagccaggcatggtggcgggggcctgtaatcccagttactcgggaggctgaggcaggagaattgcttgaacccagggggcagaggttgcagtgagccaagatcgcaccactgcactccagcctcggcgacagagcaagactctgtctcaaaaacaaaaaacaaaacaacaacaacaaaaatacaaaaggtagccaggcgtggtggtgcatccctgtaatcgcagctgcttgggaggctggggcaggagaatggcttgaacccaggagacagaggttgcagtgggccgagaccttgccactgccctccagcctgggcgacagagactccgtctcaccaaaaaaaaaaacaaaaacaaaccaaaacacctaagtggcacaggggcctcctcgtgactttctgcctcagtttcccctccagcctgcccccctggtgtcccatggaggatctcgataatcgcacatctgggtgtgccgcccctttgctgctcgaacaccatccatggctccctatgccccagctcctggcctgtagggcaggcaggattctacagggctggcccacatccacccatctcactggcttctctgccctttgctttttagagaaggattcccgctctgtcgcccaggctggagtgcagtggcacgatttctgctcactgcaccctccacctcccgggttcaagtgattctccttcctcagcttcctgagttgctgggattacaggtgtgcgccaccacgcccggctaatttttgtctttttagtagagatggggtttcaccatgttgcccaggctggtctcaaactcctggcctgacgtgaccctcctgcctcggcctcccgaagcgctgggattacaggcgtgagccactgtgcctggccttcactgccattttctcactttcttccctaatcgctacacacctactgtgtgccaggcatgattctaggccccaggatctatagtagaaacccaaatcagacaaactctcttcgccaaagtcatattagagtggagaaaagcagtggacaagagaatatttgttgggataaattgtgcggagcaaaaaatgctgtgaagataaagaatgcagggaaagccgggcgcggtggctcatgactgtcatcccagcactttgggaggccgaggtgggtggatcacttgaggtcaggagtttcagaccagcctggccaacatggcaagaccttgtccctacaaaaaaaaaattagctggatgtggtggtgtgtgcctgtagtcttggctacttaggaggccgacatgggaggatcacctgagcccgggaggttgaggctgcagtgagctatgatagcgccactgaacttcagcctggttgcccaggtgagaccttgtctcaaaataataaaaataaagaatgcaggaaaaagtgattgtgatggggatgactgaagtaggaacagcgtgttccaggcagagggaaaggccctacctgggaccatgcgtgaacaccttcagccacagggaaggtgccaggaagggtcagactgaggcagtgactacggggcaggggtcgtgagcctccaaggtcagccctgcctcagccaatcctgctgcaccccaactctgcctggaatcggtctttcaagtccttcctcctcccccaccagtcagtgagtccagaaacttctttctcttaaaccaaatggttaagatcctggctgggtgcagtggcttacacctgtaatcccaacactttgggaggccaaggcgggcggatcacttgaggtcaggagttcgagaccagcctggccaacatggtgaaaccaccccccaccccaccccgtctctactaaaaatacaaaattaaccaggtgtggtggcgggcgcctgtaatcccagctactcgcctgtaatcctgaagcaggagaatcttgggaggcggaggttgcagtgagccgtgattgcaccattgcacttcagcctgggcaacaagagtgaaactctgtctcaaaaaacaaccaatcaaatggttaagatcctgaatttcctgcatttgaatccagattccctggctctgtgaccacttagagcctcagtttccttatctgtaaaacagaccctccttcagagagaatcctttgagagatccaattttcactgtaccactcaagcactgctggaggcgtgatagatgttcaggacaacacagccggtattactgttgttatctttatgatatctttgccttcctaattagtctggttgcccctaggggggcaaagaggtccctgagcagccagcaggagactcagctacagccctgacttattcctgcccttgagcaatgttctgatgtccgtgggcctcagttttcccatctgcaccatgggaagagagcgggatcatttctagctccctaattccaccagcactgcaggtgcagcttttattttctcccccaagactgcctgaagggcacacagagggacggagaaggctcagctgcagacaattcagccagcgcaggcacctggccggcctgactgtgaatgtctaatgcgtcctagctttagctcctattccccgctccttttcctccacccctccccgcccccaaccgggctggggatggggaagggggattctgtaagtgctcccaccctctgctggaggccagagcctggccctttggggtgcagatggggggaaatggaggatttcagaccccggagtccccagtcccctgacagacacccccccaccccccaccccacctccgctagagtcctgccaccggggcctgtgggattctcctccctccactgagaaccattgtgtggatgggggcaatcgaggcccagcgggcaggggatctcctcacctgctggaacgtccctcagaatgggggaggggggctgggagaatggtggggtcggagaaggggagagccttggagaaggggcttccagaggaaacagggtgttagagcgggagaggtaaccagaaaggaatatgggcccaccccagtcctctctgctcccctctggtcccatccaaggagctgggagcatcgctgtgcctccccctcctccctctcctcctccccctcctctgcctccccctcctcctcccttccctccctccttctcccccaccttcctattcttccctcccttcctgctattttctctccctcctccctcccctcagttttctccccacgcccctccctctccctcccctccctccccctccctccacttccctcctctctctcctcccctcctccttcccctctccccctcctctccctacccccgcctccccgctgttctctcccctcccctccccctaccctcccccgtcctccgcctcattaggcgcggccgcggcgcggggcccattagccgatcaattagccgaggtcgcccgcggcgcagtcgttaagcgcggggcggccgcggcggggagggggctcggagcccgcgcctccgcccgcccgccccggcttcccggacccgagcacgcccccccaggacgcctcctgccacccgccccccagcgggccccgggaccctccccaaaccctgcgggggcctgggagacccccggatcgcaggccaggccgtggctgagtaggcaggaccccttcttccgagaagaccccttgtgggggtgtcgggcttgtgacccccccccaggcatccttctgctgccagcaacatcaatatcagtaatacttactattgttattattattattactagctgacactcttgagcccttgcagaagttctaattctcagtacaattttccagaaattgagatcagagcgtgacttcacttgccccgaatcacccctaagggtcggagatgaggagccccaagtaaatatgttggcattcctgcagttctttctatgtgtagatttcacacacaaaaacgcaacccacactccccgttccccgttctcctccgcctagtctttctctatcgacacacccgctgacacgccgtatattttacttgtttatctgttcaccccagccaggagggcggggctttctgtcttgttccctgctgggcctctgggactcagggtagagtctccacagacgaatgaatgggccgggctgcggtgtctctcgcctgtaatcctcgcactttgggaggccgaggcgggcggatcatctgaggtcaggagttcgagatcagcctggccaatatggcgaaaccccatctctactaaaaatacaaaaaattagccaggtgtggtggcgggcgcttgtagtcccagctacctcgggggctgaggcaggagaatcacttgaacccgggaggtgggggttgaagtgagtcgagatcatgccactgcatgatctgggcgacagagcgagagtctgtctcaaaaaaaaattaaaaaatgaatgaatgaatgcaccagcctctgctgtgagcactttccttggattaaaatggggtcttcctaacaaggatcggttctgtgattatacccattttacagatagagaaactaagccccagcgtggtgaagccacttgcctgaatcaaccagctgtgagaggaagagccaggatttaaatccaggctggacactccatgccgaggaacatcctaggacacctgtgccacttctgtgacagctgctgatgccttttgcactcagtttttttttttttttttttttttttgagacagagttttgctcttgttgcccaggctggagttcaagggcatgatctcggctcacttcaacccccacctcccgggttcaagggattctcctgcctcagcgtcccaagtagctgggattacaggcgcacgccaccatgcctggctaattttgtatttttaatagagacatgatttctccatgttggtcaggctggtctcgaactcccgacctcaggtgatccgtccgcctcagcctcccaaaatgctaggattacaggcttgaaccaccgcgcccggcctgcttttgttttttaataaagacagtgtctcgttctgtagccaggctggagttcagtggcgcgatcatggctccttgcagcctcaaactccggggctcaagcaatcctcccgcctcagcctccagagtagctgggactacaggcacacaacaccacgcctgactattttttggatttttagtagagatagggttgtgccatctcagccaggctggtcttgaactcctggcctcaagtgatcctcccaccttggcctcccaaagtgctcggattacaggcatgagccactgcactccgccttatttttattttttgtagagatgatgtcttcctatgttgcccaggctggtcttgaactcctgggttcaagtgattctccaatctcagcctcccaaagtgctggggttacaggtgtgtgccagcgtgtctggctggactcagggtctttgtgtgggaactggggtagggatgttgcgaaacccaccctgcttttggtgggtgagagtcagaggaggccttcagaaaagtgacttctagggagtctcagagaattagaatgcctgggaggggaaataaagagaaccctgttccaggcagagggaacagcatgtgaaaaggcctcaaggcaagggacagcaagatgtttcaccttggctgcagcctgttgagtaggagtgaaaggagggatgggtagggtctcctgggccgaggtgaagaatttcgaattaattccaagggcagtgagagccaaagataatctttttttttttttttttttttttgagacagaatctcactctgtcagccacgctggagtacagtggcatgatcatagttcactacagccttgacctctagggctccagcaatcctcctcactcagcctcccaagtagctgggaccacaggtgcacaacactatgcccggctgattctttttttttttttttgagacggagtcttgctctgttgcccaggctggagtgcagtggtgcgatctcagctcactgcaagctcctcctcccgggttcacgccattctcctgcctcagcctcccgagtagctgggaccacaggcgcctgccaccacgcccggctaattttttgtatttttagtagagacggggtttcaccgtgttagccaggatggtctcgatctcctgaccttgtgatccacccgccttggcctcccaaagtgctgggattacaggcataagccaccgcgcctggccataattcttatatttttgtagagatagggtctcactatgttgcttaggctggtcttgaactcccagcctcaagcgatcctctcaccttggcttcccaaagtgctgagattacaggtgtgagccaccaggagcagcctatcttttttcatgactgtgtagtattctgctgtgtgaccatgtcacaatccatctatttgattgggggcaattatgacaaattacagcagctctaaacactcttgttcaggtctgtttttttgttttgttttgttttgttttgtttgagatggagtttcactctgtcacctaggctggaatgcagtggcgcaatctcagctcactgcaacctccgcctcccgggttcaagcgattctcctgcctcagcctcctgagtagctgggactgcacggctgccaccacacccgactaatttttgtatttttagtagagatggggtttcactatgttggccaggctggtcttgaacccctgacctgaggtgatccactcacctcggcctcccaaagtgctgggattacaggcgtgagccaccgcgcctggccaattgttcgggtctttttgatggactcatatgacatttccgttgggagatggatccaagaggggaattgctggattatgtggtgccaagtggccttctgaagtagaggtaagagtttacccttgctggccgggcgcggtggctcacgcctgtaatcccagcactttgggaggccaaggcgggtggatcacgacgtcaggagatcgagaccatcctggctaacatggtgaaaccccgtctctactaaaaatacaaaaaaaaattagctgggcgtggtggcgggcgcctgtaatcccagctacttgggaggctgaggcaggagaatggcgtgaacccgggaggcagagcttgcagtgagccgagccgagattgtgccactgcactccagcctgggcgacagagcaagactccatctcaaaaaagaaaaggaaataagaagaatttacccttgccaaggggtgtgcctaggcgtgttcaggtttcaacaagggtaaatgtcagcaggggatgatcccttgcaactggcatttttagaggcactttggctgcagtggagatggggtgggacctgccaggaggctggtgtgatcagccagccctgtcccctccactcccagccctctcctcagggacatgagacattttccccaatgtcggctgtccatctccacccttgtcagctcccctcagctcggacttcctcctgccgtgaagtccctccagagtagaaatggccatctcccatttgctgggtgggcagcaacatgttcccttggcccaagtcccagaggagccaggggctgaggccaagatgggaaaactgggggcaatcccctttccttctggcttccccacggctggtgcagcttgggtgaggcggtgggggttggggggcttctggctgttccttagaggatggaggctcagctggggcgagtcagtgttctctctgagtatactggccaggcacgggggctcacgcctgtaatcccagcactttgggaggctgaggcgggaggactgcttgagcccaggagtttgagacctgggtaacatggtgaaacctcatttctacaaaaaaaaaaaaaaaaaaaattatatatatatatatatatatatatatatatatatatatatatatatatatatatatatacaaaagattaggcgagtatggtggtgcatgcccactgtcccagctcaggaggctgaggctgaggtgggaggatcactttagctcagggaagttgaggctgcagtgagctgtgatcacaccactgcactctagcctgggcaacagagtgagaccctgtctcaaaaaaacaaacaaacaaacaaaaaaaacccacccagaaccgaaaagaagtgtacctgtgtgggcactggggcctcctctttctctaagggaagagaatgtcctttaggtcttcagatctcgggtgcagaaatcagctctgccactgactcacttattttattattaaaaaaaaatttttttttaggagatggggtcttgctatgttgctcaggttgtccttgcactcccggcctcaggcaatcctcccacctcagcctccccacttactagcttagggatcccttcgcctttttaagcccccttaactgcctgtctaaacatcaaccacctgggccatgctgtgtgacctgaagtcttcagctcaccctctctgggctaggcatcagagcagtgtaggccaaatgcagaagcgtgacccaccaactctttttttttgagacagcgtcttgttctgtcgcccaggctgaagtgcagaggcatcatctcagctcactgcaacctctgcctcccgggttcaagcaattcttgtgtcccagcctcctaagcagctggaattacaggtgcacgccaccatgcccggctactttttgtattttttttttttttgagatggagttttgctcttgttgcccaggctggagtgcagtggtgcgatctcagctcaccgcaacctccttgaattcaagtgattcttctgcctcagcctcttaagtagctgggatcacagttgcccaccaccacgcccagcttttttgtatttttagtacagacagggtttcaccatgttggccaggctggtctcgaactcctggcctcaagtgatctgcctgcctcagcctcccaaagtgttgggatgacaggcgtgagccacaccgcaccgggccacagctaggaactcctgatgttctaggaggatgtctcacattggaaggaaccccgtcctcccccgggggcagccacaacacagaggcagggacacagcaccgaagcttctcacatctttattggaaaggcacagctaagcccacccttgatacagcattttccacttctctctgtagagatcagacgattgaacacgagataagctgactatatacagacacaggtgtgggtgttgcttttttttaaaaacacttttgtctttttttttttttaatatcccctttcttaaaagacaagctagtatactggaaaaagaaaaaaataataataaaataaaaaccaagacaactttagtaccctcatctttatttgggaaggggagggggaatcctgggtcgcccaccctcaccctgctcctcccagctcagctaagctcgtccctcgtgcccccccttttgtgggcgatgggagaggaccaggtgggcgtggaggtgtctggaactagcagaggtggtgagtggggcaggtggaggtgggagcatacctgggacccggggtcgggggagactcggggtgcccaggacgggaaaggggcagctagcattgcgtgcatgcagtaccagggtgagagggctgtggcccaggcagactgtcggttacacatgttcaaaacgggggaagggccggggctgctgcgcttcgcgaggtcttgctcccttgggacctggtctcccatctgaccctccaggccttagcttgcctcacatgtcagggcaggtatccacctaaccaggctgcaggggaggaggagggaagccgggaatggggtaggaagaaagctagaggtggcctgcaagctgggctggggcccccgccggcggccaccataaatactatgggagtttagccaatcccgagctccgctgtgtcttgtgctaaacattcctttctctccgtgcctctgtctcccctctgtcccccctcccaacctccctgtcccggccccctgctaatccgacttctcgccatcatcctcctggtgggtgtcaccatcgtgcccgttcttgtcttccttggagaggtgggcctgggaacccagcgcggacagcgagaggaggccggtgcctgcgctgaccgccggcagcgaaggcggctgcagccccacgggtagtggggtcaagggcagggccagggcctgcagctgggacagctggtgggcttggagctgctgctgcagggcgggggaggggaacattagctgcctggggcccacctgtcccccgcccacccgcccaggtccccatacatactcggatgatagagttcagctcgggagcggtgacctgcttggccctctcaatggctcccaagacctgctgctggtgctggaagggggtcgggggagaggagaggcagtgattcctcctgatcctgggagaggagagggggacggccctgaggccaggaggagccccactaccaagtgggccatcatgtctgctcctcccagtggttttcaaccccatcagaaagcaccctccctctctccaactgcttcctttcaccaagctcgtctcttcgtctggccaacagagacaaatggaaaagtgcagaaaacaattaaaagggttttgtgctaagtagttaggaaacagcttttgagtgagcccgggagaaaccctggatcctgacctatcctatgtgcacagccacctgcaaagatgtgaaacatgtgaatgtttgtgcagtacacaacctgcccaactgtacagggacgtcctgatcctaggagctccaagactgtgccctgagtctggccaaattgagcccttctcctaccatggctggggagggcccaatgaattctggcagggctggctggggaatgggctcagattcagggcagttcctccctgagctctccccaaacacctgactctgtggccagcagatgctagaatctaccaatctccctttttgccttggctaccaggaagcctctgttctgaagggctccaagtgcccttttctctagggctttcattgggtcctgctaagacttgtccctgggcaaagcagggcacccaaaggatcctgagatacccacagggattgaagaggaagttacaaacttttgacagtaaacttggcagggacaggagatgggccttacatggccctggggaggggcggcctcgcatcctgagcctcagaacccaagaaaggagaagaggagctgggcgtcaggttcatctgggtgtgtgtgtgcatgtggtaatgtgtgctcaggatcacgtgtgcccacgtgtagctgcacattcctgcatgcgtgtccctgtgctgtctgcacacacgtgtatccgtgtctgcatctgtgtatctcccgtgtgttgatgtgctcgtgcctatctgtgtggctgtgtccatgtgtgaccaccctgtgctaccccttcccccacaatcccctaacaccctctagtccttggtcctgtgcagcccgcatggcctggaggaggatgtctcaagagggtgaaaggaggaagagagatgagaaaaaaacattcctggtgcagtttaggcccatctgacatttctacctatgacatgactcactccagctgggaattccagagcagggtgaggcccgccccccacacgcctgcacccctggagtgtctctggcccggggattcttctgcacaggccggctctggtgttcagagccagggaggtccagagaggggaggcgtgtgccctggggcgcccagcacaccacccaagatggctgcagtggacaggggctgggcaagtgcggggccccctcacaacccctccccaaggccctggctcttacctcttgggagaggtagggcaggacctgggcacaaatcccgttcagccttttgacgatctcagcctggaacacacagatgaagccggcttcagtcctgggcgggtggcaggtgcaggctagccacaggaggcctgcgcggggcccggcccagccctgccacttgcggcttctaagaggggctaggtctggccagggtgggatgagcaaagccgtgttcgggcccgagggcagccagtcagtggcaaaggtggggctggacaccggctgtcgcctgcagcttagagtgaggtaagtgcaggatgaggccagactgcacattcctcgggggtcggccactcaggcccctggcaggtagtaagcgcttgtgcgaatgtagggagggctgggggccgtaggctgtggggaaggtctctgcccctccccaccaccgggagaaacactcccagggaggcctgaaaaagaggcggggcgggggggaggagagcgggagcttggggagggcttaggaggtaacaggataaccgggctggcttggtgcccagccgagggccggccgctacctgcctgggggtgcccaaggcggggctggaggtggggggaggagggggaaggaggaggaggaggaggaggaggaggagatgggcgtacctgtttgtgcatctcgatgttcaagccgtaggacatctcgtagtactgtatgggggagagagagggggagcgggagatgggggtggggaaggatggggggacacggagacaaagagataggggagtggcagagacagacaaaggggggagacagcaagagacagctgagggcaggaaagaaaggagaggcaggtgggagggaaagaggagggagagacgcccacacccagcatcccagcccgccctggagaggggcagggggccgctggggctgcggatggagactgggggcactttaggtccctagccctggcctggctcctcccccactccatgtgcaccgcgagaacacgcattccagggctcctaatcttgtatctttctatgtcttgtctgcgggtgggcccagacgccagggaagtttgcctgcctaggtataaacagtgaggggtaaacaaagcctgctggctctggggccagcagctacccccaccccaagccccagatctcaccctgcccctcccctgctctaaaccctcccatggctccctgtcacccctgggggaaaaccaagttcattcccaggccttcacgtagtttctctgtctctgtctggtgaactcctactcatcctgcaagaccccagctgtgtgccccatttctccatatagtcttcctcaggcaggtcctaggtccctctctctgaccccagccctattcttctggctgggagggtcagggtctggctctgcctcccccacagtctgggagatttgggtactgggctgagaccccagcatcgctgctcgagggccaggccaagggtgggtaagggaggggatttttgatgcagaaatcgtcacctggcagttacaaaaccgagcaagtggttctggcagcagcaatgcagtgtcacacatcagccccccgaaatgggtagggctcagaccccctcccacaggcttcttctttgagctcgggcccaaaggggttaagcgtgtggacgctgggaccttggcggtggggagggactcggctgctcccccacgtcagttcctggctgttggctttcacagccggtgagcctccctctcctccctcctccgctgccaaggacagccgggggacctggcagggccggtctgcaacccggcggtttggcacctcggccactgcctcggccatctgccaggctagcgaggcaggctcagcccagcaggggccggctgaatggagaacaggccccgatcctcgcgcttcccaggggaggtggccggggttgagggagcagctgcccgtggtggaggggatgtggagggccctgtcgcccgcccccaacactggacctgggggcggagtgacgttaccatcacatagtgacgctgcatctctgacttctcactggccaacttgtcacattcgagcttgaggctgaggaggcacaggggggagatggggtggttagtggcggctgggcgggagccccccaccctccgttatccaggggaggaaactgaggctccaagtcccctgtaagggcaagatcagccaattctcagagggtcaagcaataattttttttttaaattgagacgggggtctccctatgttgcccaggctggtctcaaaaactcctgggctcaagcaatcctccttcctcggcctcccaaagtgcttggggttacagatatgagccacccaccgtgcctggtcaatgaagccgtaaactttcataggggctgaggacattgaattgaggggcagggaagttggtaagagttgagctctctgtgatgctgcggggaggggagagcatcagggcccctgactgtaagaagggggtgatgaaaccacccttgcagatctggttggggggaaataagcaacattatagtaacattataggaacaacagaagttagagggggcacggtaacgctagctctgagagtctcacgagccttcacctctcacggtcccgacgaggcccgcaacgtcattgtcacgctccttttatagatgacacagtggacacccagagagggtgaggaactggctcaaggtcacacagccaagcagcagcccaagctctcaaccacaggggaaaattttccagacccaaatagaacgtacaaagaggctgagagggtctggggctgcaaggcggctcccggctggacttcccaaggggaccctagcttcatggggggcctggacttcccaggcagacccctcagctccctcttagtccttcctaacagccttttttctttagctgggacaaaacacaccatttctcccactccacctggccagtccgggtggctgacaccagagcttcctacaggccctcccgggaaggatgagctgtggggcgtttctcaaagcccccatgagggcgtcatggccggagggaagagagcaggcaggagggcctcccagtccaggaaaagaactggtgatggtggtgggggaggtgtcctttaacctacttaaatccaacccagcacaggggccctgcggacctggctgtggcttacctgcttctgccatccccaccccctctcggactgggttcaaagctcagcccttcgtcttccctgctgtgtgactctaggcaaactccactacctctctgggcttcatttcctcctctgtgaggtaccactaacaacctcgcagggtggggtggagaagagtcaatgaattcagacaagaaaagttctagaacagtacctggcatacagtaagcatcccataaatgcacatggatcttaggataccccaggaacctggcattttgctccaccggagaagagtgtgccgggttagggatgctttggccgccaccaatttttctctagttttcttttaaaatgtgcatttgttgctaccattaaaaacaaaaacaaaaacaaaaaaaaaccggggctgggtgcagtggctcacgcctgtaatcccagcattttgggaggccaaggcgggtggatcacttgaggtcaggagtttgagaccagcctggccaacataacgaaagcccgtctctaccgaaaatacaaaaattagccgggtgtggtggtgcacgcctgtaatcccagctacttgggaggctgaaacagaagaatcgcttgaatcccaaaggtggaggttgcagtgagccgagatcgcgccactgcactccagcctggcgacagagcaagactccgtctcaaaaaaataaaataaaataaaaaagaagtttcactccaaagcctgcatttctggcctttcttgaaaaataggatggtctggccacccaggggctgttacgcctcgaacatccggtgtgtgcctctgatatggtagggtccctcgttggacagcaggaagcccaggcccagcggatggagaccccaaagctcagagagggcttccggcttagcagaggtcacacagcactgtgaccgccatctgatcccttccctgtggaatcaggtcagccccggggctcaccaggcggtatccaacccttcatatcgaggaacccgcacaaaagcttctggggcctgcatggaaagctgactccagcaccttcgactgtcagtgtctcagtttgcccagcttgagaatgggtacgacagtcggacgacaggaaggatgaagcacgaggaggcacgaacggtcttgagcacacagggagtacccaaaaaggtgggatatttgcagcagcaacaacaaaatcgagattcccctttctacttggaggaaatccaggatccttccaggaacacttctggggtgggcacgcttcagtttagagagggccccaaggccaaacgggggtttgagcatagcctgactttctccagattcccaggcccggcgtgcccctccagagcagggcaggcgagaacctatatccttaaaccaggagagagacctggtgcaaacctcagccttgccacttcctcaatgctatggacacccccgaggaaataacatcataacatctctgggcttaagtttctttttttctttcttttttttttttttttttttttttgagacagagtctccctgttacccaggctggagagcagtggctccatctctgctcactgcaacctccgcctcacgggttcaagcaagtttcctgcctcagccacccgagtagctgggattacaggcgcccgccaccacacccagctaactatgtatttttggtagagacggggtttcaccatgttggccaggctggtctcgaactcctgacctcaagtgatccaccttcctcggcctcccaaagtgctgggattacaggcatgagccaccacgcctggcctgggcttaagtttctttaagtgtaagaggactaaatagttccttccccttagataccgcagcgtggcaagctcttcagaaacgccagatttctgaaagaagcagcaccttggagaatctgacgggtgctgggaaccctttctccaaaactgggcaaagagagagatgaccaggctgcagaatgtttctgttttgggggttgagggatggcgagtccgtgccgtaactccaattgttggaaggtcttttatccaatgggggacttgggggtattggggaggagggaggggctctgaagccacacagctgaatctttgggcaaattatttaactatttttgtgcctcggttttctcctctacaaaatggggctgtttaaaataaatgaattcagtatttgtcaagtgattaggtcagagtctagcatatattattttcccaatctccaggcctcagccttgccatctgcgcagaagaaatggggggactcacattctcgggacgcagggacccccagtcccccagctcacctgtggtactgagcttgcagtagctgaaattcgtctttgatgcggtcgcaggagtccgaggtggtgaatttgagttgctggggtaggtgcgaggagccctgtagggatggggcggcccgggtcaggcccaggcgtgggctggacccccctcaagggccggctaggagggagcggccgcgcagctgcggcgccccccctcctgccccacttcctgggcccgtgtttacggcccctggcgcgaccccacccgcgcttcctgccccccgcctctcccgggggaagccgagcgggtgggtgcgcccggagccgccccgtcccccgccacccccaggcagtgggggtgcgttttaaggcccgccctagatggggggcagggtgcgccctctaccgccctccaaagcgccgggagggagtgcacatccgaggggggtagaaacgcgccctagggagccccctccccaagttggggggcagcgattcctccctgcaaagtcctcttgggggaggggtctctctctcggtgctcgaaatcttccgggggggcccaaccccagattcccagcgcccttcctcggggacacgctcttccgggaggggtgcgcctcggatcaccccccccaccacaggcccccaaaggatccccgggctagaggtgcctcgcggggcttccggagcgccccaggcccgaggccaaggccgtccgaggccctgactgtcccggcgggttggggggggggggcgccaagccgggagctgcggcgggggggctcggggcccggaagctggggtggatcgggaactggagggggggtgtccgggggccggcggcaggaggggaggggggtcgcgccgggctgggagctggagagggaagacagggccggggagttggggggggcgccgggccggaggcaccgggcctgggggttggggggcgcggggccgggagccgggggtcgggggcgtagggcccggatccggggtgggggcgccggccggacgggccccgcttaccgaatgcctgctttgtggaaacatcatgtcaatcgcggcggggggcgcgggctgcgccccggctgtgcgccccggctcgggctgctgggggcgccgggcggccgcgcctttgtcccggcgccgatcggcagctcccggggccgccgccgcctcccgcgcccggcctcgcccgcttcctgcgccccctccccgcgcgcccggccccggcgcgccccgggccccgcttcctgcgcgcccggcgcccctccccgcccctccccgccgcccgcctccccgctccccggccccaccgctattgtctaatggcggcgacgccggcagtggccgcggctcggctgctgcggaggcttcggctccacctgccgccgcccgtgccccgtgcgcgccgccgaggggggggacgcgcgcgcccggggaggcctgcggatccccacgccggcccgcctccccgtggcccgcccgccgcggtgaccttgggcccggcccgcccccgccccgggcagcggcccccgccaccctctcctacccggcagccggccgggcctcggtttccccatctgtcaaagaaaagggacccggctgcccgcgtcgaagccgccggccctgctgtggcacgacctggacgcgtgccacggacgtgctctgtgaccttggctctggctgggcggtggttcttgctgagccttagtttccttttctgcagaaaggcagcggtaatgccgccttcctgagggaagccattcttgtgacacatttatagaacgcctactgtgtgccaggccccgctgctccagggccctggggtggggcggggcgggggtgggtccctgccctggtggtggtgcctggagacagacagagacaaattcacaagctgaattcctggcaggtcagatggtggggacagttctgcagaaaaaccagccgggagaatggcagggtaggaaggtgcaaagttaaagaggtgggagggaggatcagagacggcttcctccacccctaaagcgacctgaagaaggagggagaacagggggatggggtacagaggtagtcagaggcaggaccaacaggtgcaaaggccctggggcaggactgtgcctggcagcagagtgcccggggggaggtcaggaaggccggagggaggcagggccgggggcttcgtgcttttgtccagggcccccccaccccacagcagggcttgtgcttgggttaatatttactgctgcattttgagatttctaatcatttttgaacaaggggcctttgagttttcttttgcactgggccctgctaactctgtagctggtgaagcaggccagtccagcaaggacttgtgggtcttggggaggacttgggattttgctctgagtgaggtaggagccctggaaggctgtgggaggaggagggacgggacctggtggttggttggtttgttttttgagatggagtttcgctcttgttgcccaggctggagtacaatggcacaatctcagctcaccgcatcctgggttcaagtgattcctgcctcagcctcccgagtagctggattacaggcacgtgccaccacgccccgctaattttggagttttagtagagacggggtttctccatgttggtcaggctggtcttgaactcccgacctcagatgatctgcccgcctcggcctcccaaagtgctgggattacaggcgtgagccaccgtgatcagctgtttgtttgtttttgagatggagtctcactctgttgcccaggctggagtgcagtgatgtgatgttggctgactgcagcctctgccacccggattcaagtgattctcctgcctctgcctcctgagtagctgggattacaggtgcgcatcaccacgcctggctaatttttgtatatttagtagagacaggtttcaccatattggccagactggtcttgaaatcctgacatcaggtgatcctcccgcctccacctcccagagtgcagggattacaggtgtgagccactgcgcctggccctggacttgggcttttgctctgagtgaggtgggaatcctggagagccgtgggaagaggagggatgggacctggtggcggttattaaaggatccctctctctgccacgcagagaacaggtcccaaagaggctactgaaataaggctatgacattaaggtccccctttggcaggtgcgaaacacagtctcttcatcatcgtcatccactaggcagcctgctcccttgaatgaatgcaattgatttgggccttgggtgttcccatctgtaaaatagacttggaaccccaggctccttaccttggcaggtaagggtgatagccttcagtgatcaagattaataatctttaaagcagtgttttaatatttttattaaaaaaaaattttttttttgaggtggagtctcactgtgtggcccaggctggagtgcagtggtgccatctcggctcactgcaagctccacctcccgggtttatgccattctcctgcctcagcctcccgagtagctggggctacaggcgcccaccaccacgcccggctaattttttgtatttttagtagagacggagtttcactgtgttagccaggatggtctcgatctcctgacctcgtgatctgcctgcctcggcctcccaaagtcctgggattacaggcgcgagccaccacacccggcctaaaaaaattttttcagacacagtcctctgttgcataggctagagtgcagtggtgcaatcatagctcactgcagcctcccactcctgggctcaagtgatcctccgacctcagcatcctgagtagctgggactacaggagtgcaccaccatgcccagctaattttaacattttttgtaagccgggagcagtggctcatgcctgtagtcccagcactttgggaagccgaggccagtggatcacaagctcaggagttcgagaccagcctggccaacatggtgaaacctcgtcactactacaaatacaaaaattaccggggtgttttggcgggcgcctctaattccagctacttggaggctgaggcaggagaatcgctggaagctgggaggtggtggttgcagtgagccaagatcgcgccactgtactccagcctgggtgacagagtgagactctgtctcaaaaaaaaaaaaaaaaaaaagatgaggctagaaaggattaggattttggatttttaagattactactacttggtggccgggtgtggtggctcacacctgtaatctcagcgctttgggaggccgaggcaggcggatcacctgaggtgaggagcttgagaccagcctgaccaacatggagaaactccgtctctactaaaaatacaaaattagcctggcatggtggctcacgcctgtaatcctagccacttgggaggctgaggcaggagaattgcttgaacctgggaggtggaggttgcggtgagccaagattgtgccactgcactccagcctgggcgacaagagcgaaactctgtctcaaaaaaaaaagaaacaaagaaacagagattaatactacttagtaacagccaagccttcaaccaaccgcaacacccttgtttttcctgcagggccctgagagactgcgttcctagactgcccctgaagccagtcctgccgctagcacccctgccaccccacccccactgccgtggggaccagacaccccctctcctgggaggccacctgccagtgtttatttaggcaggcgccttccggtatcagtgtgcccgcccagtgaccaaacagccccattttcgaagcccccacactgtcaggggaagcagaactggacacagataccttgagcacggtgaggtgagggctgggccacccacagggacctaggcctgtgaaggagagagtcattgtgaaatcatcgtttttagaaaataggttttttttctgcatagaaggcagcccagaatggtggcccacactataaataatcaaccaagccacacaggtctgtatgtttttgctccgcaccaggggctgccttaagcactttaacctttaggtacagttgtcacacccattttagagatggggggaaaacaggccggcagggtggctcaggcctgtcatcccagcactttaggaggccgaggcaagcagatcacttgaggatcaggagtttgatactagcctggccaacatggcgaaaccccgtctctactaaaaatacaaaaattaaggcgtggtggtgggcgcctgtaatcccagctactctggaggctgaggcaggagaagcgcttgaacccggaaggcggaggtttcagtgagccgagatcgtgccactgcactccagcctgggcgacagaatgagactctgtctccaaaaataaaaaataaaaaaaaagaaaacgaaaaaaaatggggaaagtgagtcacagagaagtgaagtgacttggccaagtgggtagggggcagaaccacgatgttatcccaggcctttgatcttgaccttgggcctttgagcactctgcagtgtggcttctggccgggacacgatggcagcacgtgctgctgggctgaggagctgggattttacctggagggcactagggagccacaggaggttttagagcaagattcttcagttagcgccatcgcattccaccctgggcgacagagggagactccatctcaaaaaataaaagtagattgcatcaaaatagtgtttatcctgatgacttaggtatttggcatccccttagcttttttatttttttttgagacagggttcttactctgtcacccacgctggagcgcagtggtgtgacttcggctcactgaagcctcgacctcccaggctcaagcaatctgcccacctcagcttctcgagtatccgggatgaaaagcgtgtgccaccacgcccggctaatttttgtttttcatagagatggggtttcaccatgttacccagactggtcttgaacttctgggctccagcagtctgccctcctgggcctcccaaagtgctgggattacaggtgtgagccaccacgcctggcccctcttaagtttgacacctgaaaaaaggacctcactctcggccgggcgggctcacacctgtaatcccagcactttgggaggccgaggcgggcagatcatctgaggtcgggagttcgcgaccagcctgaccaacatggataaaccccgtctctactaaaactacaaaattagccgggcgtggtggtgggtgcctgtaataccagctgctcaggaggctgaggcaggagaatcgcttgaacccaggaggcagaggttgcggtgagccgagatcacaccattgcactccagcctgggcgacaagaatgaaactccatctcaaaaaaagaagaaaaaaaaaaaggacctcactctcaagtacactcatcctggtcctagccctgcctcagtcaaatagcaaagtctgctttttggacattctggcccagatcattcattctcttggggggcaaggggcgtcctgggcactgcagggtgctgagcggtgtccctggcctctactcactccatgccaggggcacccccgagatgttccgcccacaggtgtccccagacatcacccagtgtcccgtggggggcacaatgacacgagaatgagcacccctggcttagagcatggaagaaacagggcagctggtggtagaagattctccccggtagtgtgatgggaggattaggcgagagatgggcagcctgggctgggcccatggcaaagagcttttttggggagcataacaagaacagaatgcagatggcgggagggtgaggaagggcagacagcttgccgcaggagggaatgtgtaattaattggcgagaattggggtttaagcacatcacagtgtctgggtggctgccactgagcccccctaccccacacacataaccccccacccccgtccctgaccccacgtgtccggctcacggtccttcctctccctgggattctcagggccacatctggggccaaggcggggcggggatctgtctcatggatccaatcgtctgagaccaggctcaaggcctggttacaaatgagcgctgggccccgcggcctccagggcagagcctggcgctggcgcgtgatggatggggccgcatggccattaatcacaggccggggaggaaacaggtggccgccgtgcagaagcagggacctccctctgctgggcccgggtggaggtaggactcagctgtccagccctggggttgagctcccggactgctgctacctggccgggtgacgtggggccatgagagctcactgctcaagaccttagggtcaccccactgctactcccaaatgcagcttcagatacttagagagcagttactgtgtgtcaggcatgcttgtaagtggaggttctgagcagtgaccaaggagagaaatccccccactccaccttttggagctgataagcttaaaacttttatttatttatatttttggagacggagtttagctcttgttgcccaggctgcagtgcagtggcacgatctcggctcactgcaacctctgcctcccaggttcaagcgattctcctgcctcagcctcccgaatagctgggattacaggcgtgagccaccacgcctggctaattgtttgtatttttagtagagatggtgtttctccatgttggccaggctggtcttgaactcctgacctcaggtgatccacccgcctcggccccccaaagtgctgggattacaggcgtgagccactgcacctggccccattcttgattgaagtgtcactctctcaatgaagctgccttcagcttccctatttgactgaggcagggctaggaccagggtgaatgtacctgggagtgaggtcctttcttaaggcataaaacttaagagaggcagggtgaggtggctcacgcctgtaatctcagcactttgggaggccaaggagggcagattgcttgatcccagaagttcaagaccagcctgggtaacatggtgaaaccccaactctacaaaaaacaaacaaacaaaaattagccaggtgtggtggcgtgtgcctgttgtcccagccactcaggaggctgaggtgggaggattgctttagcccgggaggctgaggctgcagtgagccaaaatcacaccattgcactccagcgtgggtgacagagtgagaccctgtctcaaaaaaaagaaagaaggctgggcgcggtggctcacgcctgtaatcccagcactttgggaggccgagactggcggatcacaaggctaggagatggagaccatcctggcgtgcgcgcacacacacacacacacacacacacacacgccgggcgtggtggcgggtgcctgtagtcccagctactcgggaggctgaggcaggagaatggcgtgaccccgggaggtggagcttgcagtgagccgagatcgcaccactgcactccagcctgggcaacagagtgagactccgtctcaaaagaaaaaaaaaaaagaaagaaaaaaaaagttaaggggatgccaaatacctaagtcatcaggataaacactgttttgatgcaatctacgtgtttttttgtttgtttgttttgttttttgagacagagtctcgctctgtcgcccaggctggagtgcagtggcatgatctcggctcactgcaagctccgcctcccgggttcacgccactctgctgcctcagcctcccgagtagctgggactacaggcgcacgccgccacgcctggctaattttgtttgcatttttagtagagacggggtttcaccgtgttagccaggatgctctcaatctcctgacctcgtgatccacccccctcggcctcccaaagtgcagggattacaggcgtgagccaccacgaccggcccactttttttttttttttttttttttgacggagtctggctctgtcgcccaggctggagtgcaatggcgcaatctcggctcactgcaacctctgtgatccactcacctccccttcccaagtgctgggattaccggcatgaaccaccgcgcccagccaacaatattttaacaaatcaaaattaatgaaaaaaaatccacaatgaacaaaatatcaaaatgttaaataaaaatcttgcataactcactcagactgcctcctaggcccagctcatagaggcctcaacccatattccgcgtgcaggtcatgaggtcagcgttttccctgctccatgggacacagcactgtctgacgtgtaatgcggtttgtgtgtttactttcttgaatgtaggccccgggaggcagggggtttggtgagtcctggtcacttttgtatcctcaatacctagaacagggcctggctcagtataaatgcccaatagttactgaatgagtgaatgaataaatgaatgggttaagatgacacaccaggttgttgcagaattaaatgagataagaccctggaagtaattagcacacagcacccagttggctcctgacatccttaatctacaccttatggcctgagtacaatgttctgattggccagccctgggtcacatgacatccttgagacaaattttatggctcgagtagaatgctctgattggccagccttgggtcacatgacttttcttttttctttttctttttttttttttttttttgagacagagtcttgctctctcgcccaggcaggagtgcagtggccggatctctgctcactgcaaactccgcttcccggtttcacgccgttctcctgcctcagcctcctgagtagctgggactacaggcgcccgccaccacgcccggctaattttttgtatttttagtagggacggggtttcactgtgttagccaggatggtcttgatctcctgacctcgtgatccacccgcctcagcctcccaaagtgctgggattacaggtgtgggccagcaggcctggcctggacaattacttcctctgagaggccttctctaaccagtcatatggaaaaaacaaaaaatattgttattatatcactctattttattgttatctatttttatttatttatgtttatttaacattttgatatttatttatttttgagacggagtctcgctctgtcacccaggctggagtgcagtggcatgatctcggctcactgcaacctccgactcccgggttcaagtgattctcctgcctcagcctccttagtagctgagattacaggcatgtgccaccacgcccggctaattttgtagttttagtagagacggggtttctccatgttagtcaggctggtctcgaactcctgacctcaggtgatcccccccgcctcagcctcccaaagtgctgggattacaggcatgagacaccgcgcctggcccaatttttgtatttttagtagagatgggatttcaccttgttggccaggctggtctccaactcctgacctcaggtgatctgcctgcctcagcttcccaaagtgctggaattacaggtgtgagccactgcaccctggctgggctgatttttttttttttccaagagtcagggtctcactatgttgcccaggcttgtcttgaactcttggggtcaagcagtcctcccaccttggccttccagagtgctgggattacaggcatgaaccatcgtgcctggcctaattttattttatttttttagtcagtgtcttgggctgtcatgcaggctggagaacagtggtgccatcatagctgattgcagcctcgaattcctggcctcaagtgaccctcccacctcagcccctcaaagtgctgggactagatgcgtgagccaccaggcaggccagctgtcatctttattatctgtcaccctgaaagatccatgagagtaaggagcggactgccttctgcactgctgtgtcccagggcacagcttggggtctggcaaagaatttctactcagtgcaaacatcaggtcttagtgaaatgaaagaatgagttagtatttatttatctggagatggagtcttgctctgtcccccaggctggagtgcagtggcatgatctggatctcggctcactgcaacctctgcctctcctcccgagttcaagcaattctcctgcctcagcctcccaaatggctgggattaaagatgtgtgccaccatgcctggctaatttttgtgtttttttgtttgtttgtttttggagacggagtcttgctctgttgccagactggagtgcagtggcgcgatcttggctcactgcaacctccaccttctgggttcaagtgattcccctgcctcagcctccccagcagctgggattacaggagtgtgccgccatgcctggctaattttttgtatgttagtagatatggggtttcaccatgttggccaggagggtctcgatttcctgaccttgtgatccgcccgcctcagcctcccaaagtgctgggattacaggcgtgagccaccgtgccctgccttaattttttattcttagtagagacagggttttgccatgttgaccaggctgctctcaaactcttgacctcaggtgatccacctgccttggcctcccaaagtactgggattacaggcgtgagccactgtgcctggctgacagtaattatttattatccccatattccagatgaggaaactgtggctcacaaaggggcgatcatggattttgtctgccttcctctccacccccagagctctgtcacacaacatggctttattgaacacttgcacgcctggtcttcgtctagatattagggatacagtgacccacatagctccaaccttacagcctagcaggggagccagacattaataaaatcactatacaaacatatgtggttataatccctcagcaatcccattggctccagctttaccaatatacccagaatccaatcaattcccactaactatagggttaccatcctggctcatatccccatcaacttgttcagtgcagcagtctctcatctcacgtcgtattttttgagtggatgtgacaacggaataacaataacaaaaaaaaaaaaacggaatggcttaagtccatggaactgaacattcatgacattagggctgacttcaggcatggcttgatccaggggctccaacattatcgggatcctgtgtcactgtgcatagctgggacagctgtctcccatggcagcaaacaaacaccgttccccagcagctgtaagctttcatcctcccagctcagcaactccagccaattccttctgcttaattacagcatgtctcaggactcattctcattggccaggcttaggtgacatgacatccctgatataatccctatgttctggctggaatactctgattggccaatcttgggtcacatgacttttccatttcaatctttttttttttttttttttggaggggggagatggagtctcattatgttgctcaggctggagtgcagtggcatgatcctggcttactgcaacctccacctcccgggttcaagtgattctccttcctcagcatccaagtagctgggactacaggcgcatgccaccacacctgtctaatttttatatttttagtagagacagggtttcagcatgttggccaggatggtctcaatctcctgacctcgtgatccacccgcctcggccgcacaaagtgctgggattacaggcatgagccactgcgcctggcctaatttttgtatttttctagagatggtatttcaccatgtaggccaggctggtctcgaactcctgacctcgtgatctgcccgcctcagttccccgaagtgcagggattacaggcatgagacaccacgcctggcctgttgtggttttgagatgggggtctttttatgttgcccaggctggtcttgaactcctagactcaagccacccgcccccccttggctgcccaaagtgttgtgattacaggcatgagccactgcactgggccaaatgtgttttgtttttgtgcttttcaccgtccccagcgcccccagctgccggccttgggagcctggtgttggcaggactgtgagtcactgttggggtgtttaagggcctttaaaaggtgttcccagcatttcccgggggctgtgcactaattaggtgattagtaggctgactcctgcagatgtctccctggggataccgggggactgtggggagcagggaagtgtggctgcctacttggcctgccctccagaggccccattgcctccccatagacacccaaggggtaagtgccagcctcagctttacgacaggtgggctctgtgtctctggacaagtggctgtccctctctggtcccatctatctgctttcccatctatctagtgggctgtgggcatatactatggtcctgtaggagccagagccactattcttgctctgttactcagatacctctaacctctcctcccagcaaaataatcatcccctttatcataaatggctgaggtttaccaaattttctcagagccccagcactgatccaggccttcaaggtaggcgcagttattactactttttttttttttttttttttaaatttcagagacagggtctggctctgtcccccaggctggagtgcagtgcatgatcatagttcactgcgcctccacctcccaggctcaaatgatcctcccagctcagcttcctgagtagctgggactacaggtgcacaccaccacacctggctaattttaaatttttttgtagagaaggggtctccctatgttacccagactggttttgaaatactgggctcaatcgatccacctgcctcggcctcccaaattgttgggatcacatttgtgagccactgtacctggccaaattttgtggggttttttgttgtttgtttttttgagacagagtcttgctctgttgcccaggctggagtgcagtggcatgatcttggctcactgcaacgtccacctcccaggctcaagcaattctcctgcttcagcctcccgagtagctggcattccagctgcccatgaccacacccagctgatttttgtatttttagtagagatggggtttcaccagtttggccaggctggttttgaactcctgacctcaaatgatccgcccacctcagcctcccaaagacctggggttacaggcatgagccacaaaaattgagtccaatctctgctcacaccagagaccaggataaactcccaatgggccagacagcgtaaaccagggggccccagctcctgggactcacctcctctctccctccccactgagggtgtggatttcaatgtgtacagcctcctagacccagtagggcagatgatcatgggacacagagtctcttgggggggtccgtggaatcccataacccagggggtctcaaccagggtgattctgctcccagggggcactgggtgatgtctggggacatttgtggttgtcacaatggtgggtactcttggcatggagtgggtggaggccacggatgctgctcagcaccctgcagtgcccaagacggcttcatcccagagaactatctggctccaaatgtccacagcggccaggggagagacctcattccagagctcgatagccaccaaccatgcatggttacttaggtttacactgagatggatggaaacgggccaggctgtaattaaccccagcgctttgggaggtcgaggcgggaggattgattgaacccaggaggtcgaggctgctgtgagctatgatcgcggccctgcattccagcctaggtagcagtgacaagctgtagatagatagatagatagatagatagatagataaaaatgagatgaaagatgcatttcctcagttgccctggccacggttcaggggctcagcagcccaccagtgaccaccacgtgggacgccacggagctagaatgtaggcgatgtggcagaaagtcctagcgggccgcgcagcgcggagacctccccgggtgcaaacgctccccgccccccacccacgcggcgcccgtgccgccggccgctgttccacggatgcccacacgggggcagtgtgtcatcaggatctcgcgcaccttggctcaggtcgcctgcacctgccctctccccaggagggtgagccaggccgctgggggtttggagacagcagcccctcggcttacaaatcctttgcgagcacctgctgtgtgccaggctgtgtgctgggacagctcagtaaatcagagagtcttatccatgctttctcaccgtggactttacgggagggatggttctctggggtggggctgtcctgggcactgcagggtgctgagcagcgtccctggcctccactcactccatgccaggcgcacgccccagtcgtgacaaccacagatgtccccagacatcacccagtgccccctgggagcagaatcatcctccaggttagaatccctgggttaggggattccgcagacccccaagagactctggatcccatgatcctctgccctgctgaggtcccaggtggctacacacattgaaatccacaccctgagtggggagggagagaggaggtgaatcccaagggtccccatggtttgtaccatctgccccatcgggagcttattctgctttctggtgtgagcagggagcagactcaattttccccccaaataattaactaagagatccccattctagacactgtggacattcaaggctggattgtcctctaggatgaggccgccttgggcactgcagggtcctgagcggagtccctggcatccacccactccatgccagcagcacctcctccaagtcccgacaaccagaaatgtccccagacactgctgtcaatctcttgatcaaggggtgcaaaatcaccgccacctgagaattcctttcttttttttttaattttttttgagacagagtctcgctctgtcaaccaggctggagtgcagtggcacgatctcggttcactgcaagctctgcctcccaggttcatgccattctcctgcctcagcctcccgagtagctgggactacaggtgcccaccaccacatccagctaattttttgtatttttagtagagacggggtttcaccatgttagccaggatggtctcgatctcctgacctcgtggtccgcctgcctcagcctcccaaagtgctgggattacaggcgtgagccaccgcagccggccaaaaattcctttctagtgaatcaactcatcacacatataaatatttatttgtttattttatttttatttagtttttttgagatggagtcttgctgttgtcgcccaggctagaatgcaatggcacgatctcggctcactgcaacctccacctcccgggttcaagttattctcctgcctcagcctcccgggtagctgggattacaggcacctaccactgtaccctgctaatttttgtatttttagtagagacgaggttttgccacattggccaggctggtcttgaactcctgacctcatgatccacccacctcagcctcccaaagtgttgtgattacaggtgtaagccaccgtgcccagcccacacataaatatatttaaattatgaaataagcagttatggccaggcgcagtgtctcacgcctgtaatcccagcactttgggaggccgagatgggcggatcacgaggtcaggagataaagaccatcctggctaacacagtgaaaccccgtctctactaaaaatacaaaaaaattagccgggtgtggtggcgggcgcctgtagtcccagctactcgggaggctgaggcaggagaatggcgcgaacccaggaggtggagtttgcagtgagctgagatcgcgccactgcactccagcctgggtgactaagtgagactccatttcaaaagaaagaaagaaagaaagaaagagagagagagagagagagagagagagagaaagaaaggaaggaaggaaggaaggaaggaagaaagaaaggaaggaagaaagaaagaaagaaaggaagaaagaaagaaagaagcagttatatgaggtgagggagctgtaaacttttcttgaccatcacatctccacccaggtaaaagtgattctcctgcctcagcctcctgagtagctgggactccaagtgcccgccaccatgcctggctaatttttgtattttttagtagagatggggtttcgccatattggccagtctggtctcgaactcctggcctcaggtgatccgcccgcctcggcctcccaaacacacatatacacacatgtactcaggacagaggtttaagtacctgcataaccccaataaaaattgcacaagataactcttcgctctgcaaagcaccacgcactgtgatgtttcctattctacttcatttaaaaaatatatatgggtcatgatccactgaattgatttctccacccacagactgaaaaaaataataattaaaatagcgactgggaatcacgcactccagaaacatccccaggcccttccactgtagaaaaaaatgaatgagccaggcaccaaggctcacacctgtaatcccagcactttgggaggcctaggtgggcagatgacctgaggtcaggagttcaagaccagcctggccaacatggtgaaacaccatctctattaaaaatgcaaaaattagccgggtgtggtggtgggagcctgtaatcccagctactcaggaggctgaggcaggagaatcgcttgaacctggaaggcggaggttgcagtgagccgatatcgtgccattgcattccagcatgggtgacaagaacaaaactccatctcaaaaaaataaattaaaaaaaaaatagtggtagcccggcacggtggctcacacctgtaatctcagcactttgggaggctgaggtgggaggatagcttgagcccaggaggttgaagctgaagtgagccatgattgcaccactgcactccagcctgggtgacagagtgagactctgactcaaaagtaaataaataaatataaatgcctccttctcactttatttatctgtctattttccaaatagattcatggattctctctctctctcttttttttttttttagatggagtttcgctgtcgcccaggctggagtgcagtggcatgatctcagctcactgcaacctccgcctcctgggttcaagcaattcttgtgactcagcctccctagtacctggaattgcaggcatgcatcaccacacccagctagtttttgtatttttagtagagacgagagtttgccatgttggccaggctggtctcgaactcctgatctcaggttatctccttgcctctacctcccaaagtgctgggattactgcagcctcccgagtagctgggactacaggtgtatgccatcatgcctggcagattttattttatttttttgtggagacaggttctccctgacaagcccaggctggtcttgaacgcttggcctcaagtgatgtgcctgccttggcctcccaaggttttgagactacaggcatgagacaccttgccaggcccagaaggaggggtttagaaggagtaacagggatagacaaagttacattgtgtagggacagagctcacactgtgggtagacagttccaggcagaaggcacaggctgtgcaaaggccctggggtaggactgtgcctgactagttagaggaacactaaggagacctgtgtgactggaggaaagggagacagggaggaggggaggacggggaggggctggtgcaggcccttgtgggccatggggcggacttgggcttttcctgaaggaaggtgggagccatggagggctgtgagccgaggagggacaggccctgactcagatttgaattcagttatgaaggccgagtgtggtggctcatgcctgtaatcccagcactttggtaggctgagtggggaggatcacttgaggtcaggagttcgagaccagcctggccaacatggtgaaaccccggctctactaagatatacaaaaattagccagacgtggtggcacgcacctgcagtcccagctactcaggaggctgaggcacaagaatcgcttgaacccaggagaggaaggttgcagcgagccgagattgtgccactgtactccagacagggcaacagaataatgctccatcagaaaaataaatacataaataaaataacaataattcagtgtgactttaacatgaagaggcttctccactaaatccatgtctgcagaaaccgggcacgagctgtccctggctgtgcgtggggatgtctgtggatggtcagacctccctgggctcggaatgggcttgtttcaaatgcagcttcctggggctggctctccgcacagtctaattcagcaaaggcggggcagagtctgagctgtgaccccgtgtcccgggtgtttcccgaatcataagatcagatgagcctgtgggcagaagctttgtaggaggccgtgtgcgtggccagagcctgcagccctgggtgcaatctgttttgcccttacttgggaataagaaactcaacctgctcacaggaggaaatggtttctaatgtttgtttttttaaaagagaaagtcttggctcagttatttgcccgaagccagaattgggataatcaaggagcttaaccaaaaccttcattcattcgttcggatttagtgcatttctttatttatatatatagtttttagagacagggtcttgctctctcgcctgggctggagtgctgtggcacgatcatagctcactgcagcctcggcctcctgggctcaagtgatcctccctcctcagcctcctgagtagcggggattaaggtgtgcactatggcaccctgccagatttaatatatatacacacacatatatatatatatttgagatggagtcttgctctgtggcccaggctggagctcagtagtgtgatctcggatcactgcaacctctgcctcccgggttcaagtgattctcctgcctcctgcctcagctccccagtagctgggactacaggcttgcatcaccatgcctggctaatttttgtatttttagtagagacggagtgatcctgacctcaggtgatctgcctgcctcggcttcccaatttttttttttttttttttttttgagacagagtttccctcttgttgcccaggctggagtgcaatggcatgatattggttcactgcaacctccgcctcccgggttcaagtaattatcatgcctcagcctcccgagtagctgggattacaggtcccaccaccacgcctggctaacttttgtatttttagtagagacggggtttcaccctcttggccaggctggtctcaaactcctgacctcaggtgatccatctgcctctgcctcccaaagtgctgggattacaggtgggagcccggccacaggtaactcttatatccctgttttgccaaaaggaaatggaggctaagggaggaggagtccctggttcaaggtcacagctcaaggtcatggagttgggagggagagcaaggagggagtgtgggaatttgaacccagggattgtgattgcagggtctgtgttgttatctgccccaaaacttttccacatgtgcacagcctccacctggacccagccctatcctccctcagcttgacaagccaagtcctgtctgccctggtcccctcgatgcagggcaggtgagccccaaaattggggcttagcctgggagggttcttggcttcacccaggaaagatttcaagggcaagtggtattagaaagggagtttttttttgttttttttttttttgagatggagtctcattctgtcacccaggctggagtgcagtggcaagatcttggctcaccacagcctctgcctcttgggttcaagggattctcctgcctcagcttcctgagtagctgggattacaggcacgtgccaccatacttggctaatttttgtatttttagtagagtcggggttttaccatgttggccaggctattctcgaactcctgacctcaggtgatctgcctgccttggcctcccaaagtgctgggattacaggtgtgagccacggggccaagcctggttatttttttcagacaaggccttgctctgttgccaaggctagagtgcagtggtgcaatcatagcttactacaccctcagcctcccaggctcaagcaatcctctcacctcagcctcctgagtagctgggactacaggtgcatgccaccacacgtggctactttttaatgttgtatttttagtagagatagggtctcgatatattgctcaagctattcttggactcctgggctcaagcgattctccagcttcagcctcccaaagtgctgggattacaggtgtgcggcactgggcctggccaagcaactttccatgtgcccgttggcctacggaaatttttatcactacgcttatttcaccgatgaagagatggagattcagagagggcaagtctccccctgaaagtcacacagcttggggagggtgtgctggatgagaaccagagagccggactcccagcttccagcagcataaaccacggctgttgttagtatggagtgtaggcgtctgtactgacatgtcttcatttctgttggcaaaatacctaggaatgaaatggctggatcctgtttatttattcaaaataaatataaatagatactgtttatattatttatttatctatctatttatttatttaatattatctttttcagaaggagtctcactctgttgcccaggctggagtgcagtggcatgatcttggctcactgcaacctctgcctccctggttcaaatgattctcctgcctcagcctcctgagcagctgggactacaggcgtgtgccaccatgcctggctaatgtttgtatttttagtagagacggggtttcactgtgttagccaggatggtctcgatctcttgacctcgtgatttgcccacctcggcctcccaaagtgctgggattacaggcgtgagccaccgcgcccagccacttttgtatttttagtagagatggggtttcatcatgttggccaggctggtctcgaactcctgagcccaagtgatccacccacctcggcctcccaaagttctggatttacaagtatgaaccacggccagccctagatcctgtttaaatttttttttttttgagacggagttttgctcttgttgcccaggctggagtgcgatggtgcaatctcgactcaccgcaacctccgcctcccaggttcaagcgatcctcctacctcagccgcccgagtaactgggattacaaacatgcgctaccatgcccagctaatttttgtatttttttagtagagacggggtttctccatgtcagtcaggctggtctcgaactccctacctcaggtgatccacccacctcggcctcccaaagtgctcggattacaggcgtgagccacagcgctcaactgatcttgtttaaattttgaagaatccggccggatgcggtggctcacacctgtaatcccagcactttgggaggccgaggcgggcggatcatgaggtcaggagattgagaccgtcctggcttacacggtgaaagcccgtctctattaaaaaatgcaaaaaacattagccgggcgtggtggcgggcgcatgtagtcccagctactcaggagtctgaggcaggagaatggcgtgaacctgagaggcggagcttgcagtgagccgagatcacgcccctgcactccagcctgggcaacagagcaagactccgtctcaaaaaaatatttttttaaataaagaatctgctagacttttttccaaagtagccgcactatttcacattcccaccagtcatggaggagaatcccagttgcttcctttttttttttgtttggttttagatcaggggttctcgttttgtgtgccaggctggagtgcagtggtgcgatcatacctcactgcagcctcaaactcctgggctcgatcgatcttcccacctcagtctcccaagaaactgagaccacaggcatgcaccaccatgccttactcatttattattttttgtagagatggggtcttgctgtgttgcccaggctgctcttgaactcctgagcttaagtgaccctcatgccttggcctcccaagtagctgggaccagaggcatgtgccaccatgcccagcttgaccattttttaaattttttatttctgagacagagtcttgctctgtcccccaggctagagtgcaatggcgccatctctgctcgctgcaacctccgtctcctgggttcaaacaattcccctgcctcagcctcccgagtagctgagatgacaggcacccgccaccatgcctggctaatttttgtatttttagcagagacggggtttcacctcgttggccaggctggtctcaggtgatccacccgccttggcctcccaaggtgttgggattacaggcgtgagccaccaagcctggcctgatgattttcttttttctttttctttttttaatttttgagacagagtcttgctctgtcgcccaggctgaagtgcagtggcgtgatctcggctcactacaacctcggcctgccgggttcacaccattctcccgcctcagcctcctgagtagctgggattacaggtgcctgccaacatgcctggctaatttttgtatttttagtagagacggggtgtcattatgttggccaggctggtcttcaactcctgacctcaggtgatccacccgcctcggcctcccaatgtgctgggatgacaggcgtgagccaccacgccggctgattttctttatggcaggcaatgagtgctcattttccaccctgaggcctggaggggctggtgtttgggtgcggagggtcctgccccctgactccggagctgtagttctggcaataggtgcccttgcaccctgcctgtcctcagcctgggtccccatcacctttgtcctcgctcgcagctctgtgccaggaaatggccttgttctcaccccgggccctcataaaatccagttcctcaaggtccaggaggccaaggccacaaggaagggaggaggccgtggggagctgaggagggagggaggggccgccaacgccatgaaggcactgctgtgagtgtggactttgtcactctgagcctctgggtggggacgctggagtcagtattcagctccgggttggggcccagggtcaactccccatctctggatgggcctcagtttccccatcttccccacaggaggctttctgtgtcctggcccagttcccggcacacagtaggcactgagaacggaagaccccccatgatgttgttgtttcttttctttctttctttctttttttttttttgagacggagttttgctcttgttgcccaggctggagtgcaatggcgcaatctcagctcactgcaacttccacctccagggttcaagcgattctcctgcctcagcctcccaagtagctgggattacaggcgtacaccaccacgcccagctaattttgtgtttttagtagagacggggtttctccatgttgagtctcgtctcgaactcttgacctcaggtgatccgcctgcctcagcctcccaaagtgctgggattacaggcgtgagccaccacgcctggcctgtttcttttctttctttcttttccccctcccctcccctctcctcttctactttcctttccttttccttcttttctttatttttttgagaaggagtctcactctgttgcccaggctggagtgcagtggcgcaatctcggctcactgcaacctgtacctcccgagttcaagtgattctcctgcctcagcctcctgagtagctgggattacaggtgcccaccaccatgcccagctaatttttgtattttttggtagagacagagttttaccatgttggccaggctggcttcaaactcctgacctcaagtgatccgcccgccttggcctcccaaagttccaggatgacaggcgagagccaatgcgcctggccttttcttttctttttctttctgccagggtctcactctgtcacccaggccggagtgcagtggcacaatcacagctcactgcagcctcaaactcctggccccagcaatcctcccacctcagactcccaaaatgctgggattgcaggcgtgcatcaatacacccagctaatttttaaattttttttctttctttttttttttttttttgagatggagtctcgctctttcacccaggctggagtgcagtggcgcgatctcggctcactgcaggctccgccccctggggttcacgccattctcctgcctcagcctcccatgtagctgggactacaggcgcccgccacctcgcccggctaattttttgtatttttagtagagacgggattcaccgtgttagccaggatggtctcgatctcctgacctcatgatccgcccacctcggcctcccaaagtgctgggattacaggcttgagccaccgcgcccggcctaatttttaaatttttttgtagagatggggttttgtggtgatgtccaggctaggctccaactcctgccctctaactatcctcctacctcagccttttgaagtgctgggattacaggcgtgagtcgctgagcctggccccaactgttgttcctgctccccactggatctcctcccaacaatgcccaggacagccctgcagccaggagggggtttccacggagtttcttttattattattattatctgagactgagtctcgctctgtcgcccaggctggagtgcagtggcacaatctctgctcactgcaagctccgcctcctgggttcatgccattctcctgcctcagcctccaaagtagctgggaccacaggcacccgtcaccaggcctggctaatttttttgaatttttttagtggagacagggcttcactgtgttagccgggatggtctcgatctcctgaccttgtgatctgcctgactcagcctcccaaagtgttgggattacaggcgttagccactgcgcccggtccacggagtttctttaataaatgctcaaggctgggcgcgctggctcatgcctgtagtcccagcactttgggaggccgaggtggggaggtcacgaggtcaggagtttgagaccagcctggccaacatggtgaaatcccggctctactaaaaatacaaaaatgagccaggtatggtggcgcatgcctgtaatccccgctgcttgggaggttgtggcaggagaatcacttgagcccggaggtggaggttgcagcgagccgagactgcgccattgcacttcagcctgggcgagagagcaagactccgtctcaaaaaaaaaaaaaaaaaaaaaaaaaaattgctcaaggccgggtgtggtggctcacacctataatcccagcactttgagaggctgaggcgggcagttcacttgaggtcagcagttcgagaacagcctggccaacgtggtgaaacccatctctactaaaaatacgaaagttcgctgggcgtggtggcggatgtctgtaaccccagctacttgggaggctgagacataagaatcgcttgaacccgggaggcagaggttgcagtgagccgagagcatgccactacactccggcctgggccacagagtgagactccatttcaaaaaaataaaaaaaataaaaacgtaagtaaaaataaaaaagtaagtaaatatccagtctagtacctggcccatagcagacgcccaatcaataatcatcaataaatagatcccatttcaaattgtgacaaagtatctgaaagaaaagaacagcgtgttatggcagagactggttgaggagggaggattgcttgagcccaggagtttgagatcagcctgggcaagctagtgagatcccatctctacaaaaaattaaacaaatttagctgagcgtattggtgggcacctgtagtcccagctactcgggaggctaaggcgggaggatcatttgagcccaggaagtcgaggctgtagtgtgctgagatcgtgtcactgcactgcagcctgggcgacagatcaagatcctatcacaaaaaaaaaaaaaaaaaagccgggcatggtggctcaagcccgtaatcccagcactttggctggctgaggtgggcggatcacctgaggttgggaattcaagaccagcctgaccaacatggagaaaccctgtctctactaaaaacacaaaattagctggggtggtggtgcctgcctgtaatcccagctactggagaggctgaggcaggagaatcgcttgaacccgggaggcggaggttgctgtgagctgagatagtgccactgcactccagcctgggcaacaagagtgaaactccgtcttaaaaaaaaaaaaaaagaaaaggaaagaaagaaagaaaaagaaagaaagaaagaaatacaccctgtatcatggcaggagaggtaatcaatgaataaagaggtaaatacgataatttcaagctgcaaaaagggctatgaaggcaactcaacaggacgtgacaggagggagggcttggagtgggggtggcattagttatggattttcaggtaggacccattggagggggaggtgtttttagccgaggcctgagtgacaatattgggttttttttttcttagatggagtcgtgctctgtcacccaggctggagtgcagtggtgcgatctcagctcactgcaagctcggcctcccgggttggcaccattctcctgcctcagcctcccgagtagctgggactacaggcacctgccaccatgcctggctaattttttgtatttttagtagggatggggtttcacgatgttagccaggatggtctcgatctcctgacctcctgatccgcccacctcggcctcccaaagtgctgggattacaggcatgagccaccacgcccggccatatattgttgcttttaacagagacaggatctcactgtattgtccaggctggtctctaactcctgggctcaagcggtcctcctgccttggccccccaaagtgttggcattacaagcatgagccactctgcctggccaagtgagtgacaatgtttttggccacaatttgccctctggttgtaagtttcacatgcaattggagctttgatctattgaggcgggaactccaggagccccctggctacgtgcagctgaggtgggactggaaccccagaagatgagcttttcaaggagctaatcttttgtccgggtgtggtggctcacacctgtaatcccagcactttgggaggccgaggtgggtggatcacctgaggtcaggagttcaagaccagcctggccaacatggtgaaaccctgcctctacaaaaatacaaaaattagccgggcatgatgtgggggtgcctgtagtcccagttactggggaggctgagatgggagaattgcttgagcctgggaggtggaggttgcagtgagccgagatcatgccattgattgcactccagcctgggcgacagagcaagactgtctcaaaaaaaaaaagtgagctaatcttcccacacacccaaggaactgataaacggagactttgaccctccctttgccctcttatctcaagacaagggagaagggtctatcaaggtgtacctctgaggataagggataggctcctgacatttggaaactgggaagggccaggtagagggaggaggtggtggggaggtcaggcagtgtcaggggctgggagaggcgtggcagtcagcgaagttgtatgcaatggtgcctcagtttcctcctctttaaaatgaatttccagctccaagaacaatctaggctctagtattcatttttagtatcttccctttgtctttttttttttttttttttttttttttttgtagagacagggtctcactatgttgagaccctggtcttgaactcctgggctcaagtgatcctcctgccttggcctcccaaagtcctgggattataggcgtgagcaactgcacctgccttaatttcagtttttgagacagggtcttattctgttacccaggctggagtgcagtggtgcaatcatggctcactgcagcattgacttcttgggctcaagtgatcctcccaccttggcctcctgaatagctgggactacaggcacacgctaccatgcccggctaattttatttcattattttattttattttttgaggtggagtctcactgtgtcgcccaggctggagtgcagtggtgcgatctcagctcactgcaacttccacctcctggtgtgatctcggctcactgcaacctccacctcctgggttcaagcgattctcctgcctccgcctccggagtagctgagaatataggtgcaagccaccatgcccggctaatttttgtatttttagtagagacggggtttcaccatgttggccaggctggtcttgaactcctgacctcaggtcatctgcctgccttggcctcccaaagtgctgggatgacaggcgtgagccaccgtgcccagcaaattttatttttacttttgtagggtgtgtacgtgggggtcttgctatgctgcccaggctggtctcaaactcctggcctcaagcagtcctcctgccttggcctcccaaagtattgggattacaggcatgagccactcttcccagaccaggctttttaattcctttcccatcattccaaacacatcgattgagcacctagtgtgtgttagagcctcattctaggtctctttctgtaagggaccacataggaaatctttgaagagttcttgtaatgctgccctgtggggtaagagtagccacactcagtatggaaatcaatggatgtgactggcttccaacaaaatcctatacatggacactgaaatttgagttccatataatttttatgtctacctaaatattactttcttttgattttttaaaaccgtttaaaaatgtaaaagccaggctgggcgcggtggctcacgcctgtaatcccaacactttaggaggccgaggcaggcagatcacgaggtcaggggattgaggccatcctggctaacacggtgaaaccccatctctactaaaaaatacaacaaaaaaattagccaggcgtggtggcgggtgccgtagtcccagctactcgggaggctgaggcagtagaatggcgtgaacctgggaggcggagcttgtagtgagctgacatcatgccactacactccagcctgggcgacagagcaagactccgtctcaaaaaaaaaaaaagtaaaagccattcgaagcttatggaccatagggccgagggttgtggattgccaatctttgttctaggtgaaccagacaggctctgacctcatggagctgatggccaatttgggaaactgagtctacagagaggcacccagaagaatatataatttctttcttttttttttttggagatggagtttcacgcttgtcgcccaggctggagtgcagtggtgtggtctcggctcactgcaacgtccacctcctgggttcaagagattctgctgcctcagcctcccgagtagctgggattacaggtgtccactaatttttttgtatttttaatagagacagggttttgccatgttagccaggctggtctcaaactgctgacctcaagtgatctgcctgccttggccttccaaagtgctgggattacaggcatgagccaccacaccctgcttttttgtttttttttttttttggacggagtttctctcttgttgcccaggctggagtgcaatggtgcgatctcagctcactgcaacctccgcctcccgggttcaagaggttctcctgcctcagtctcccaagtagctgggattacaggcatgagccaccgtgcctggctaattctgtattttcagtagagacggggtttctccatggtggtcaggctggtcttgaactcccgatctcaggtgatctgcccacctcggcctcccaaagtgctgggattacaggcataaaccaccacacccggcctttttttttttttttttttgagacggagtctcgttctgttgccctggctggaatgcagtggtatgatcccagctccctgcaacctctgcctcccgggttcaagcgattctcctgcctcagcaaaagtagctgagaccacaggtgcccgccaccacgcccgggtcatttttgtatttttagtagagagggggtttcaccatgttggccactctggtgttttgttttgttttgttttgatacagggtctcactcttgtgtcccaggctggagtgcagtagccccatctccgctcactgcaacatctgcctcctgggctcaagtgatcctctcagcctcccgagtagctgggattacaggcatgtgccaccacacccatctaattttttgtatttttagtagagatggggtttcgccatgttatctaggctggtctcgaactcctgagctcaagcggtccacctgccttggcctcccaagtactgggattaccggcaggagctgccgcacctggccagaacatacaatttcaagttgtggctcaagagaaggtacctggcttggtctgaggagtcaggagaagtctccctgaggagctgacgtctgaattgaaacggagaggatgctcaggggttggccaaggaggccagagagggaaaagggttttcagtagtcagcaaggtggtgggaacacacgtttttataaattctggtggccacttccatttcatctgcaaagtaaggataaagatatggctgggtgaggtggctcacatctataatcccagcgctttgggaggccgaggagggcagatcactagaggccaggagtttgagaccagcctggccaacgtggcgaaacccgctctctactaaaaatacaaaattagccaggcatggtggcgcgcctgtaatcccagctacttgggagggtgaggcaggagaatcactagagcctgtgaggcagagggtgcaatgaacctagatcacgcccctgcactccagcctgggcgacagagcaagactccatctcaaaaaaagaagaagaaaaaaaagatatcccttgggtagggttagcttaacgggcttacagcagtgcctggtatcctgtaggcatttcatgaatgcgtatacctggcctggaatggtgcaggcactgcagtaaggcctgattgacacctgatggacagcaggcactccattaatctctggtccgtgcctggcatatagaatgtgtcccattaatgcctgatacacagtaggtgtcccattaacgctttttaatttttttttttgagacagagtctcgctctgtcgcccaggctggagtgcagtggcatgatctcagctcactgcaagttccgtctcccgggttcacgccattctcctgcctcagcctcccgagtagctgggactacaggcgcccgccaccacgcccggctaattttttgtatttttagtagagacggggtttcaccgtgtcagccaggatagtctcgatctcctgacctcgtgatccacccgcctcggcctcccaaagtgctgggattacaggcgtgagccaccgcgcccggccctctttttttttttttttctttggagacggagtttcgttcttgttgcccaggctggagtgcaatggcgtgatctcggctcactgcaacctccgcctcctgggttcaagtgattctcctgcctcagcctcccgagtagctgggattacgggcgtgcaccaccacgccgggctaattttgtagttttagtagagacggcgtttctccctgttggtcaggctggtctcgaactccagacctcaggtgatccgcccgcctcggccttccaaagtgctgggattacaggcgtgagccaccgcgcccgacctccattaacgctttttaatggatgagtgaaggttcctgtcaggcaatgtcagggcgcttcccgggggcagcgactgctgcccaggcacctggagacccagagagcgcagcggccgcgtgcgcgcctccgccaccgcgcctgggccgagccgagcgggaccgagcggggccgaacggagccgagcggagccgagcctggccgggccgagtccgccacattcccacaatcccgggcggccccgccccggctcccggctgcgcgtcccccttcccacgtcggcgcaaccaaacccgcgggccccccgccctcgccccgccccgcccctttcgcgcccgccgacgccccgcccaggccgctagtcccgcccccatggtgggcgcgcttggccgccggcccctcccattggccgcaccgtctgcccgtcgcgggctgcgctcccagcctgctaggttgtccggcgctgtcgctcggttgcggcggctgcggttggcggtggctgcggcggcggcgcgggctgagtgcggccgcgcgggagtccgcggctggcgcggcccgagcggggacccggcggctcgccaggcggcggccgaggcggggcgggccggcccggggccgagggccggtggccgaggccggagggccgcggcgggcggcggccgaggcggctccggccagggccgggccgggggccggggggcggcggcgggcaggcggccgcgtcggccggggccgggacgatgactctggagtccatgatggcgtgttgcctgagcgatgaggtgaaggagtccaagcggatcaacgccgagatcgagaagcagctgcggcgggacaagcgcgacgcccggcgcgagctcaagctgctgctgctcggtgagtgcggcccccgggcctgccggctgcgggccctgccctgcctgtgcctgccctgcctgtccgggtcgggccgggaccctccggggtcagccctgcctgtgccgtccgggtcgcgagaccctccggggtcagccctgcctgtgccttccctgcctgtccgggtcgcgggaccctcgagtgtcagccctgcctgtgccttcactgcctgtccgggtcggggcggggccctccgggatcagccctgcctgtgtcgtctgggtcggctcgggaccctctggggtcagccctgcctttgctgtctaggtcggcacctgggaccctccggggtcagctgcgggcccctgatttctttggggtcagcccctgccttaactgttcatgttggcacctgggactctccggtgtcagcctgtgtctgtcctgtctggatcaggcccccgatcactcctaggtcagctcccagcttctgctgtctacattgggcctccaggactcttcaggatttgccctctgttccttctcaagggaccagtccctccctgcacagggaccttctgaccttaccccaccggagtacccacccctcgctaccccttcagggccagacctttgggctgtaacccacagggcacactcacccctcactgctcagggccccgcgttgacccttccctccaggcagagccctgtacactccatgcaggccctgtaccctccatgcaggccctgtacacccccccatccccccgaagactcctccgtgtcccctatccccacattcccttcagggccattctcctgccttcctgttccgggaaaccccgtactcctcttggctggaatgcaccctgtgggaaaaagacagtctttcctctcctcagggttccgctcagctgagggtggggcggttgacacctgagggagcctttgcttgttgtcccaagcagctatctcggcagcctcccccgcccccttccttagagtcctggtgggagccacgctgagtcctcgttgagagcagccccccacctgccggctcctccccaccgtcctggagaaggtttgctggtgaacctccttctccccaaggcacacctgctgcagggagccagtcgggccagctgtaaagtgttgtcactccaaataagggccccttcagtggtttacaaaacagaagctcttgccctgccccgcccctgccctcccgagctcctaggttagctcctgggccgggggcggggcggtggggaaggtcggaaatgcgtgagaggcagcggtgacggaggagggggcgtgctggtggcggtggctcttggggaggaggcaggtcgcatgttgtgtggggaacacgttgcctctcctgccgtgagcctcttagggccctccgtgtcccgggttacagaggtgccttggatgaaacgccttcctgatttttttccccaaacttgtgttttgatttacctaagggttctaaaatgggccatctttccagggggccgcgggtaggcagagccgtggtcctcacgtttggaggaaatgtgcagtgcggcccgcgtggtggcactttgcacagagtggcactggctggcttttgtagtgggtcgtggactttgtttggatggaggggagttaggaattactggtgtcataaagatcttaccagatggccttgccctgtggctctgtgacctccagaacccccgccgccatccctgcatgcacccggtcttctgtgcctgcactttggacttgagattgacacggggttcaaggacgaaggtcaggggctcccgtgtctgccgccttggctgcttggagcaagtctggaagtgatgcggcccttcccgcatcctctgtccagtgcccgcctgtggcccgggggtgtctgctgcaggagcacctgtgtctgcagtcccaccccctcccactctgtgagcctgaaagttgacccctatcagcctgtaagacgggaggttgctgtcaggctcagggccaggcgtggcagataggacagtgaggaagatgtgagctcacgtgcgacccaaggaggactggtgtcagtgccacgcagagagccggggctgtcagggggttgggagggcttcacacccaaggtgttggagccagggacccctttgggaatctgatgcgacagaccctcagaaaacttcccgtccaagcaaccttgcatcccagctggagggccccttgctgggaggactttgaccacctgaggtccaggggctggggcctcagggtgcaggggaggggacctctgtcaggctccctgcctgcttgtgggaactcattccactctcccagtaggccagccccgagcttgcgattgcccccgtttttcagggagcagctagagggtggggccgaggctccccggaaggaaggggctgttgggctgcagcaggtggctatggcgcctgcggcccacggaatgttcagagacctctgggtggaggtcctggcactccgcaggaggcccagccaagctgggtctgcctctccctagaattctttcctcccctgccccttagcagtgggggctccatccctcctcccccatggctcccgtacagcgttgtggagtggatgtcggggagggaggcaggggcctgccaccacacccctgtggcatctggggcccaggagggtctcgtttatgtgggtggtgctggtttcttccaggctctggggcagcagggctccagggccctgccctgactcctgggtttgcaaccaggtggagcatgttctggaagaacgccgcgtctgctcgctctcatccactgcctccctggggctgcacacggcctgtgaggtcggtcagcctggcgaggacattccgtgccccgttttcggggtgggggggaccttacggagccctagagctggacggggctccggctgccgtgccgcctctcccgcggcggctaaaatgtgctgttcacgcctcagatgggcctctccgttacgtacaacaggtctccccggggccctgtgcacattggtccgggttggtctctggggtggggctgccctgggcactgcagggtgctgagcagtgtccgaggcctccacccactccatgccaggagctcccccaagtcgtgataaccacagatgtctctagacagtgcccattgtcccttggggggcacgttgcccccatttgagaccctttactgtgtggtagcgtacaacgtaaaatgctcgtggcaaagctgagggataatgagtgcaaattattttgtcagaagtttccatgagtgcttatagagtatttttctaagcaccgtcaaagccgtgtgtgtgtgaattcactactcagtgtatgcatgaatgtgaatgcatgtattgttttatacccgtggtattccaggtttgtccctatgcacacttctgtcgatgctggtgacagctgtggatgggtacaggagtggcaagcacgtactgcgcacttagtgcacacgctgctcccgcctccgtccgcgccgccgccatcctggggtccgccctgtggcctggagagctcttgcaggccctgccagcagctcttggatctgggttcccattccccaggcccgctgggcttctgcctatcacgggcagccctcggctgttaggtttccgtctcactggtaaactgtggaggggacccccgtatagttctttgtggcaggtttgtggttggaaacgtggggacttccatgggaatgcctgttcccagggcctgaggctgctagcgaggctgagccggagtggctccaggctttctaaataaagcaggatggttagttccggaggcttcctgtccggcctgcgccagcccccacggggcagtgacaaggcccgggatccagcatggggtgcggtggccccacgggaagggccgggcctctgttggcccagtgttgggaggcgtggagcgtggcctctggcgcctggcagggtggctgtgccgtgtcccagaagactctgggagcaggaagcgcccttggatggcctcgtccaaccttgacttcccaagcccgagcccaggccagggagacgtggggacttggtccgggcctgctctcacgtcctttgtgtttacatgtaatcagttatgatgattgtggctgaaagggtctgcttttcccgggcatggtccgggaagctccgttccacagctgtgagctccgtggagcttcctcccgagcctcctgcccggctctgccggtgctgtagtgagagtggaggaagtgctttcctccgagatttaaccacgagaggtttcactttctgagtcttgtggtggagcctgtctctgtctgggacctggaccctgggcagcacggggaggacgccgtggcatcaggaggttggagaggtgtgtggtggagtcggacggatcttagaggggcgctcgcggggcctgctcggccctaccctgtagacagctgggacccagcgccccttctgggtccccagcagggctgtgttctccccactgggcaccccagcttgtgcgtggaggatgggaagccttgtatggcttgcccacctgggtgactgagagcggtggatgcgattaggggcggccaggggctctgggaaggcccacgtgcagggtcattatctggcagaaattaagtcctttcgcagaaccgggatcctaagtgccggtttgctggcgtgcaggtggttgcaggtgcatgtagctcctgccgccaggccctgtgtggagcatcccgcccggggggcctcccaccatgtctgtcatctgtagggcacctggcaggtcttagaattggctgccctggatccagactctcgctgtcatctgggcctggccacatccctcccctgccatcaagatgtctgtggtccagtctcccaccctccatccccactccctgcctctgggtcagaagcctccgatggtctctgctgtgggggttcctggtccagcctggcctcccgcagtctgccgacaggcgctttcaggacagcactggtgggtgggtcttcgggccacctgcagggcctgggagcagtgtggtgtccggatcaggtacgtggcctggggagactcaggttcagagcctacctctgcctcttgtaactgtgggacttcaggtctgtgcctcagtttcctcagggggcggtggggtgaggactcggtggtgatccccatcctgccgcacgtggggacccacggaatgctggctgctgcttccgctgccggtgtggtgatatcttgtcgcgtccacagcacctggcgtgtgtggcacacattgggtgctctgagaaactgctccatgggggatcctgccctgggatctgggatctgggatctgcccacagacaccttgatcaggattccccagcctcggctccgtgggtgttttacactggatcgttctctggggtggagctgtcttgggcactgcagggtactgagcagcgtccctggcctccacccacaccagaccaggagcacccccaagttgtgacaaccacagaagtccccagacatcgcctagtgtccctgggagcaggacccctgacccgtgtgtcttagcagcccccttcccttctcgtcgccatcgtcagctgcgtgtccttggtcccctgcttccctgcccatgtcattgagctgtgcaggtctcagagatgcttggcgagtgaccgtcattggctgactgaaggcagatcacgcagggaagtggagaggagtggcccgacacctccccaatgccctgcaggctggtctggtgcacgccaggggtctctgctggggcaggctcggttgccacctgcctgtgggcctgtgcactgggcagaaggggtctccggggacagtgcgcagctggctctcagaagcttctttctgagtcctgcctgtggcctgggctgccctgggctggccagcacggggcagtgggggcacactctggagggagccaggggcgagtcacttccctctcccggcctcagtttccccatcggtcacgtgggaaggctgtccctccccctgtaggattgtggaaggattaaatgagctgaggccagtgcggcagacagcggggagggagccctcttgtcccctgtggctgcccttcctgctggctgctttgcaccgaaaagctgcggagtaaccctgggcggtggtgctccctggatggcgtccacatggggaccccaaggcctgggaggctccaggagggacggtgctggcccaggtttctgtccctgtctgacctcggagttggtgttctgggtaccgcaccgtccggtggcccaggctccgttttctcttctgtcaaactgtgtggtcaccctgatgtttcaggggccctgcagggacggagtggggtggggggctgaagggtgtggtcaaactggagggcgctgtgtctgttgctattgttaaccgtgtccacactgatgggtgctgggccccgccaccgagcgggacttgtgcggcctgcagagatgtggctgttctgttgcctgtcttaatccccagggactgtggggccaggtccacactgtgggatgagtgcagcccccacggctgtggtggggctgggtccacgctgtgggatgaatgcagcccccagggactgtggggccgggtccacgctgtgggatgaatgaagcagccttttctccagccacactggtttgctcggccttagtcccactggatgcggcgagggttgaccggtcaggcccttgctggtggcctgggtagatgtctggagagggggcctgggctccggactcctgcccttcccccatcagtgatcctatcccacactctttggcgatggtcagtgagctgggcaggggcgggggtctgtccctgtccctcaggtggagatgtccaggccagtgcccacaactgggttagatgggctgcacaaggctggggaccagtctcccaggctgtcggggggcttcagtaatggctgtgggaagacccagcacgtgaggagacgggagcttagaaattttgtatggccaggtgcggtggctcatgcctgtaatccaagtactttgagaggccgagtcaggcagatcactcaagtccaggagttcgagaccagcctgggcaacatgacgagacccctgtctctactaaaaatgcaaaaaattagccagacttggtgatgtgcacctgtagtcccagctacctgggtggctaaggtgggaggatcacttgagtccaggaggcagaggttgcagtgagccgagattgcaccactgcactccagcctgggcgaccgagggagaggttctgtctcaaaaacaaacaaacaaacaaaacaaaacaaacaaaaaaaaaacgtagaaaacatgagtgagtgacaccatccgcttccagtggaggggtggggtcactcccacttgggagccagtctgcacggaagcctcagtgggaacagaacaaggtggcatggcccctgaccggcgaggggcagttagtatctgcacctttgaggcacctggggactctgctgctgtggagatgggattgggttccagtccagaggctgtcctgccatcgctgcccctggctgtcatgccccacctggggtagtgagtttcggggcagctctttcttgagcctcagcagcggggtgagccgggtgcacttcctctctcagggcgcccccttgtcttcttgcctccctgcctgagggtgcgtgctggagcagaagagcacgtcctgggctgcctgccggggataagctgcggagccaggagaccgaagtctcttcaggccctgccattaggggtcgtgtgacttcagggaggcagcttgtcctctccgtgcctcagtttcccctccagtcaatcaggcgctgaggtgctgtctacctcctggggttctgagactgaagcgaagcaggcatgaggccccttgtgaagctggatgaggggcgtccgtcctccgctgcaggagggctgcccctcctcgggcccctgcgtcaggttggtgcctggctctgaccccacacccaccagtacagctcttggtcagggttagatttcctggctgtttccaagagccaagatcacaggcacacgcatgcacacgcgtgggctgccaccacccgccttctcatgggtgctgacaaacggtcatgtgtatcccccaggtggggccctgtggctctggccttgctcccggtgtgtgcactggcctggcctccccgcagcctggtgggggcttcctggcttctcggcccacatctcacagtcttgggcactgtggggctcggctcaggcgtcgtagacgggaagcagcctggaaccctggaagtctgactcccaggtgtcggctcccaggtctcagccctgccactggggtcatgggttacttgaatctttatatactttttatttgttatttatttatttatttatttatttttgagagagagtctcactctgttgcccaggctggagtgcagtggtgcagtcttggctcactgcaacctctgcctcctggttcaagtgattctcctgcctcagcctcccgagaagctgggattacaggcgcatgccaccacacccggctaatttttgtatttttagtggagatgtggtttcactatgttggccaggctggtctccaacttctgacctcaggtgatccgcttgccttggcctcccaaagtgctgggattacaggcgtgagccactgcgcccggccttgaatctttttttttttttttttttttttttttttttgagacaaggtctcacttgtcacccaggctggagtgcagtggtagaatgtttgctcacctctgtctcttgggttcaagcgtttctcctgcctcagcctcctgagtagctgggattacaagcgcccactgccacacccagctaatttttttttttgtaaattttttttttttgagacaagagtcttgctctgtcgcctaggctggagtgcagtggcacgatctcagctcaccacaagctccgcctcctgattcacgccattctcctgcctcagctttcaggcgcctgccaccatgcccggctaattttttgtagttttagtggagacgcggtttcaccgtgttagccaggatggtctcgatctcctgacctcgtgatccgcccaccttggcctcccaaagtgccgggattacaggtgtgagccaccatgcctggccatttttgtaaattttttggtagagacggggtttcaccatgttggctaggctggtcttgaactcctgacctcaaatgatccacctgcctcggcctcaaagtgctgggattacaggcgtgagccaccgcgcccggctttgaatcttgagcatcggatgagcccccagctcctgctgtcagggctgcgccctcttgtggcgcttggagcctccttttcttccgttttcctttcccaccggggaaaaggaagctggggcacggacttcgttcctcctggttggcctctccagatcttggccagcgggtccagtcgggagggtggttttctcctctggaagctggctcagtgggagcagtgggcggactctggcccctcctagtggtggcgtgctgagtgtacctgaggatgtacctcctgcaggctccctagcgtctggggtccactgtggggcggcctgtggcaggcccaccaggaaccatgcttgcacaggcaaagcaccttgcttgtggttgtgtggggggctccctcaggtgtgggagatgtgggccccattctcccaggagccatggctggtgacatgcagtcaggtccatcctgacgggcactggagtgcgggggacccaatggggacatgagggatccagcactgtggaccagggccaggttcatttggttcgctcaggaaacatgtacacagcgccttctgcataggggctagggatgcaggtgggcagggcagccacagcccctgcgctcaggaagctggcgaggcaggctgcagacgggcactgccacacctcactgaggagggaatggcagagccaccctcaaagggcctgtgctgtgggggtgctgggcgcttcctgaacgccgggctcttggatttctgcagtgggggttctccgggcgtttgggaaggggaaggacctgatggaaggggtagtttatatttaactctggtgctgaagcaagggtcgcacacagctgccagtgcccacgacggcctcctgggaggctgagctcaccagctccagacccagtctgaggcaggaacctgggggtctcacagcgggaccggtggtgggtgtggcctcgtggcagggagggagggtgggaggggtgcatgtgaagttgggtttgactcgtcacccgtggagtgcgtgctcccctgccacaggcaggggccaggcagcatctgtcctgcaggaccctcccagctgccctttcatggccggacccctggctggatccctggcttcctgcagtgttctcttttcctaacattttgtcaccgtctcagtcagctcgggctgctgtgacaatactgcaggcacagtggcttgtaaactacccgagtttgtctcatggttctggaggctggacgtccaagatcaaggttctgtggatttggggggttggggggaagggggggttgtgcttcctggtacatagacagcggcgctgtggatttggtgtagggggtggttgtgtttcctggttcatagacagcggtgccttcttgctgtgtcctcatgcggacgggatccctcctggaaccatcagtgccctcatgaaagagccccccaagagctccgtggcggaagaagctgatcccgcctcccaacaccactgtcttaggggtgagaattttaacataggaatttggggggatcacagacattcattgctatgggtgggaccacttggtgcgttgcccttggggtggcggtgtggtcagtggtccattcctgcccagcgccgagcagcggtctgtgcgtggggtctttgcacccgtgcacctgctgaagggtctctggagctttggctttttggcttttacgagtaaagctgccgtggtgcttggtgtgcggtgaggagtggacagaaggctctgtcctggcaggtgccctgcagtggcctgagaccgggagatgagggccggcaaggggctgtggacgagtccagagtgaggcggcatctcggaggggctcacacattgtctcaggaggagtgggctggcatttctttccagtgggcagctgttgaagattttggagccaaaagagcgttccagctcagatgtctttcaggtggagtgtggctgcaggtggggcaggctgggtcagggtggagccatgtgggctgaggcccgagttggggctgtggctttggggccacatggctgccggtcgggtgggagcgagtctctgctgaccagggccctggatgttgagccccagccgcggggtgtgaggtctcaggcaggacccaggcattcagacattgggtccactgtgtgtggacccctgcgtcccagctccaagacgctgtgtgacgggaggcggcagcagctgagttggcgcggggagacagggcgatttgaaaagcaggctgggaccaaagcatcttgaaaacccaaatgtagtcacgttgcctggcttgagtgctgtccagagcctcgcccttggcctctgtacggcagggcttaacagtggccagcacctcagggccaccagaggcccggggccacctgggcctggcttggcttccggtggcccagaactcctgctgggctcctgcctccctctgcaacctctcctggctttggtgggttatgtgggagacacgagtggcttcacccagcgggagtggtgcacatgggttaacatgccagccacccagctgtgtacgggctgcatgtgtgtgtacatgtacatgcatgtgtgcgtgcaccatgcacgtgtgtgctgatgtacatgcatgcatacatgtatgtgtgggtgtgcacgtgtgcattgtgtgcatatatgcacgttaatgcatatgtatgtgtgcatgcctgggtgcataggtgtgagccacctccctcccccatcagtgtatccatattgcctctgcagagctccatgggggtccttggcgagccagggctgtggttgtcatttttgccttccttacaaaacgcaaaacaggccgggcgcggtggctcacgcctgtaatcccagcgctttgggaagctgaggcaggtagatcacctgaggtgaggaatttgacaccagcctaaccaacatggagaaacaccatctctactaaaaatacaaaattagccaggcgtggtggcgcatgcctgtagtcctagctacttgggaggctgaggcaggagaaacacttgggcccgggaggcggagcttgcagtgagccaagattgcgccactgcactccagcctgggcaacagagcaagactccatctgaaaaaacaaaacacaaccccaaacagtagtaccgagccagttctcatctgggcagtgacctgtggcgtttcagactccttctcggccgtcttggtcttcccggcatcctcgctgagagctgaggcttgcttttctgtttcatagttgagatgtttatggcctgagggaccttgtgtcttgggtgcaaagttaccaaggggcggcgccttctgacccgagtgcagggccctcctcgcctcctgcctgcagcatggggcctgtgctggggtgcaggcttgcagtgtgtgctggtctcgtgtcaggtgtggctttcagtgtgtgtgagtgtttgctgtttccaggtgaaacacccttccaaacaaacacggagcagccatcttttgtaatagcattttgttagacatagagtctcatctgggggcagtcttgacccatgggacactggcactgtctggggacatctgtggtggtcacaattcgggggggtgctcctgagatggagtgggtgggggccagggttgctgctgagcacccctcagggcccagggttcagcaccggtcagtagagctgaggccgaggatccctggcctcagattgcatcccctccatgccaccgcccttctcttcagggcgcggtgagggaagggcgtgtgggggtccctctggggagaaggtgttttcaccttcacactcaccctcactcctcctgtcctggaacttgggtgggtttgaccttttgtggatgaggtgagggctgagaggtggattactacctgagacaatcaaaatcaattttctttcttctgaaaaggactcagggtgtttgagaaaagtactggggagaggcagctgccaccggggctccccactcgggatgtgttgggtgttttgcgagaccccccacagggagctcaggtgctgtgggcagttcctgggctttgtcgagggcctcccgaaggcagcactgtggccaccgtgggacacatgcagcctgtctcatctctaggagctgccaggtgaggggtcctgcgacaggcacctgtgcaaagatatctaccatgggcagcaaggaaggttccagaaagtaccggagggagagttgtgttggggcttgggggctttctagagcagaggctgtgagaggaagtgagctgggtcccagcaccaggcagcctttaggcagctgtgattggaacagcactgtgggcagagggcaacagcgtaggacgtgtgtggaagtggggaggtgccggaagattcagagacacagggtggtgaaggcgagcctggagaagtgggctgggggcatgctgggagggggcggtgacgcttgagtctctagggcaccgggggcctgagcaaggttaatacctgagtagagagttgaggcagtctctttttagaaattagaagttaactattgctgtgtaatggggtcaccccaaaacttcgcaacttaaattaacaaaacttatttcagatagtttctgagggttgggaatgtgggagcactttgttgagtgatcctggcttggggtctctcagaagttgtagtcaggataccagccaagcaggggccacatcatttgaaggctggactggagctggaggagccactcacaagttggctccctctagtggctgttggtgggaggcctcagttcctcaccacgtgggcctctccgtgaagctgcttgagggtcctcacagcgtggcggctgcctaccccagagcccctgacccgagactgagggcaaggaggaaggcctgtgccttttgtgaactggccttggagatggcacactgtcacttccatcacattctgtttgctagaagcaggtcactaagtgtagcccatgctcaaggggaggggaattaggttccagtatggaagggatgagcatcagagatttgtggacacactggaaaacccagcattggcatcccagcgtgtgagggtgaagaaaagtggggagacggagtctctgcccaggaggtgaccaggtgagaggcagaggcaggagaggggctggagtgaggacccccatgtcacccagaatgtgtggggggctcatctggaggctggggtggagcgacagctggccacatgggcccccttcccgatagtttttccaggctgacttgctaatccttttcatcctctggggccctgggaccatcagtgtgcccatctctgagatggggtggtagcgtactcgtctctggaagcattgtgggtattagcaaggtcgtggcaggcgtggagacgtaaaggggttcagggatgtgctcagggccacctgtggcaggcacaacggtcctggctgaccccgccacagcaccaagagggagaggggagagcctcgtgggtgcttggtgcgcagggggcagtgtggccgtggccgctgagcaaagctctggggaagggggcgcccagcccttggggtggtctgtgcagagatgccgttggggtgagtccgtctgtcagggcaccgccgccacgtctgtgtgctgtccctctggtgagcattggtcatgaactggcgtgaccgtggtggagctgcacagtcccagctgcggggccggtgccgtgcgacttgatttggcctgagaccgtgtggtctttgacgtaaataccaacaattggcccccaggaaagtgtgtccttgcagaacttctggaaaaggggtggttccagtaagaccctggcttggtggaagatgggaagggcgctttgtaaactctttccgaggagtcaggaggccgtggcgtctggtggagagacggtcagcctcacgtgccttggtttcctgtgctgggtgctgcagcacggcagggtctgggtaagagggggcagcagcacgagagtcaggccccggctgccgcccgccctcacgtgccccgtcccccaggcacgggcgagagcgggaagagcacgttcatcaagcagatgcgcatcatccacggcgccggctactcggaggaggacaagcgcggcttcaccaagctcgtctaccagaacatcttcaccgccatgcaggccatgatccgggccatggagacgctcaagatcctctacaagtacgagcagaacaaggtgagcccgcgggcgcctggggaggggagcgcctgggcagctgtgggcttggtggtgagcatggtggccgcgctgccagggtggggccatgccgggggtcccggccggcccaggctacccctggtcatccatccgttcctgtcatggacatggaaacagcaaccgctgacttcctgggggccaactggagagttgtgatgggcattgcgtggccaagccccacagcctccctcccaagtagctgtgggcgcccacatcctgtgggtggggaagctgaggccctggggaagctgaggccctgtgaggtgagccactcgcccaggtcgccttgggagtaagcagcgtgagctcctggttccggccccttccccaggctgagcagcctaccaggcacctcgtttcggccctgacactcacccatggggctgtacttctcaccttctcacactgtttttttgttttgttttgttttgttttgttttgaaaacagggtctcgctctgtcgcccaggctggagtgcagtggaatggtcaaggctcatcacagcctggaccttctgggctcaggtgatcccaccacagcctcccgggtagctgggactgcaggtgcatcaccacgcctagctaatttttgtattttttgtagagatggaatttcaccatgttgcccaggctggtcttgaactcctgggctcaagcagtcctcccgctttggcctcccaaagtgctgggattacaggtatgagccaccatgcctggcctccgccctggttttttttcttttttttttgataaagtagaggtcatttgatgccctgtttttaaatcacagctttattgagttataattcacattctatgcacttcacttgcttaaagtgtataatttggtggttttcgatatgtttgcatagtcgtgcagccatcaccgctgtcggattccagatttcattttctcaaaggaagccccttccccatcggccgtcactcccaccccctcctccagccccggcacccacacatccccttcctgcctctgtggatcggtctgtcctgaacatttcatagaaatgggattgcacgccatgtggccttttgtgtccggcgtctctcactgagtgtgacgtcctcaaggtgcatccacacagtggcctgtgtcagagcctcgtccctgttcatggctgagtcatgttccagtgcatggagggaccgcgtatttgcccatttatcccctggaggacatttgagtgccttcatgtgtgggctgttgggaacggagctgccgtgaccgtctgtggacgtgtgtttatgtggatgatgtgttcccttccctcagttgcatgctacgcctgggagcagaattgctgggtcccagggtgactctggctttgccctctgagaagcgtccagagagtttgccccagtggccgccctatggggcaggcccagcagccgtgcagccgtggctcctgccagtggcctccctggggcctttcagctgaggggccattgatcccgctttcgtagccctgctttcaggggtagggctcttgcccttagatcttggtttgccacttgccctgtctcccgctgtgatctcttccagctgtggccctctctgagagtccatattcatatttgggcttagatctccatcagcttctgaaacacgcatctgcaaactgcagactgattttgtcgataaagttttattggcacatacccatttctgccatgttgcccatggtgcttcagcagcagcagcagagccgagtgctggagacagtccgtgtggtcgggaaggctgggtgtgctctctggctctctgcagaagcagattgctgctgtctaatctggaagtttccagggagtgggatttttggggtttgtgtctctttttccaagtccccctaggtgtgcttatcccagcccagattgagaggctgggggcagggcaaggggagggctgaagtcggagtccggggcagggagcgttgctcagaggggacaagcaagggctgagtctccactctggggggcctgggagggccccgtggctcccagagcccagggcaaggctcccttctttcccatctgggtcccacccagtatgtcccctccccagtccctcagccaaactgtggctggtcatgtcggcctgtgcgccccggggacggggacacagagcatcaggaggggaaaggatggcccccccacagtgtctgccccaaagggtgttcacatgtgtgtgcaagcacgtgtctgtgcggttggccttcctttgtgacagggcagcaagctggggcctgatgccacccgccgcccagggttccgtgagggggaggcggctcgtgttggggcaccatgtaaactgttgagtgcggcagctcgggggccacacgccgtccttagcaccgggtgtggtatctgctcttgatgatgtttgataagcatttttcggacgaaagagagaagccggcggggcagaaaccgagtctggagctgcacactgcaggcgatgccgctggttgcaacgtcctgtgactgggcttcctgcctcccggtgtgtctggagaattcgaggcagcgagtgctggggctgttggttagttctgtcgtcgtgcttggtcgtgctcggcgctgcactgccctcctgtgggtcctgggtttgaagtgtgtgtgttctacacgtgcttgttccccacaccgtcccctccccacctctaagaagtgaatcgaagcccggcctccccggcaccctgcagaccgcaccgccgggaggctttgcttgtggggccttgttcggaggaaccacaccgccaggcggcctcgcgtttttctgacacgtgttcacacggaactgtcagtggtcctgactgcacagcctgcggaatgccgcccgggccagccgaggcctggaagaggggccgtcacaagctttctggtggatgtgtggccccagcgagctctcgacgtctcccctgcccgccctcgcaggccaatgcgctcctgatccgggaggtggacgtggagaaggtgaccaccttcgagcatcagtacgtcagtgccatcaagaccctgtgggaggacccgggcatccaggaatgctacgaccgcaggcgcgagtaccagctctccgactctgccaagtagtaagtgcggccgcaccgctggcggcctggggacggcagctgcgggccggtgcctgggacccttcgggaaggcctccgcggcgtctgtggtgccccctgcctgctcgccgggggcagggatgcggtgggcccgggccacctggccggatggagggaccagagcagatccctggaggggccacgccttggcaggagccggtggactctggtgtgacactggcctgcttgtatgcctggccctgccgctgccctccctgggtcaggagtgagctcctggccaccctcggtgctggagcccggcctgtggcctgtgggggaaacccagggtctcctaggagggccgtgggatgggaggtagacacaacctgggccgtctcgctcctgcctgggacatcgtccccagagccacgtctcccactagtgactggctgtgaccttgactgatgtcagggttctcccagtctctgggcctgggatagggggtgacttgtgtgctgacaggtggccgggccatggccgcaggtggaggcccccgcgtggcaggctgtgcactgctgccctccatgcttggcaggcagaggccccggccctcccccagcaccgggagagaccctaaggcgacagggacaggcctgtcccccgcccctcctgcccgtcctctgtgtgttccctgcctctgggaggttgtgggagggcccagataaccaagcacttggaacaaaacgccagggcctcctcgcggtgccggaaaggtctgagcaggcacccggcctcttacaacccccaccccaggcagaccactcgaggggcgccccactcaggactgcccagggcgtcaaaaacgggaaactgtcccaacccagagggctgggcaggaaaaggcatgaggggaaccaaggaagccggaatcaagcgtggacttcagtagctgcgctgtgtagacactggctcattgctcgtggtgggtgccgcacccacgtacagggagcagcagggagacgggcacggggatctgctgggacctctgcagcctctgcagctgcgactctcctaatgatgcgcttgtttgtgaagcctcatccctggggccagccaggcctctctcgggaagtcccctgccctgggtcaccgtctccctccttggtggccgtctctggacagctctactacaaaccccccgaaccagctggagtcctcgtcctgggactttctcttgtgctgggtcatttctgtcccctgagaccccagagaggatagaggttgggaggctcgtatcccgaccccagggtctccattggcccgagccctccgggctgcttcagacactgccgtaggtggcgcagtgcgcggtccaccccctcctggtggctttccgtcctcccgctggtttgggtgctgtgtccctgtcctgcccccccacccccggcagccggcctgagcacccaccgctgtgttgcagctacctgaccgacgttgaccgcatcgccaccttgggctacctgcccacccagcaggacgtgctgcgggtccgcgtgcccaccaccggcatcatcgagtaccctttcgacctggagaacatcatcttccggtaccgcccgggccacagcaggcggggagggggcactgagaggctcatttgcccggtgtgccggctcatgcctgcgcacccagtgctttgggaggccaaggcgggaggatcgcctgagtccaggagtttgagaccaccctgggcaacatagccagacctcatatctaaaaaaaattttaaaaattagctgggcgtggttgtgtgcacctgtggtcccagctactcaggaggctgaggcaggaggatcgctcaagcccaggaggttgaggctgaagtgagccatgatggcaccactggactccagcctgggcgacagagggagaccctgtttcgtcttattaaacaaaagaaagcccattggtcttcatcctcagtgtgtgtttgaccaggtcaggggataagatttatctctaagtatgtgtgagccagggccacacagggaaggagctgtgggggtgtggggggcgtggccacatccatccagaccggcagccgaagagacctggcagggaggacatttgacagggcctccaggacgggccgggggcctggttggagccagcatggggctggggtctggagtgctggccggagcagggggtgccgcatggtgcgggaggggtcatagggactgaggctgccaggggagggggctcatggggaccgaggctgtgaggggaggaggggtcatagggaccgaggctgtgaggggagggggggggtcacggggaccgaggctgtgagtggaggaggggtcatagggactgagtggggaggaggggtcatagggactgaggctgtgaggggaggaggggtcataggggccgaggctgtcagggaagaggggtcatggggaccgaggctgtgaggggaggaggggtcgtggggaccgaggctttgaggggaggaggggtcatagggactgagtggggaggagggctccaggctggggtggaggagctgggtggtgtggggtggattctgttcttcacgggctgcccctgcggatcctgctgggcctccggggctccaggtccactgtggctgggggccggccagcagagccgggttctccctggggaccctcagtgggtcctgtgtctggtaggctgctcagctggctggactctgctgtccctgggaacgtggaccctgcctgcctgtctcctggccccatataacatctccagcgctgaggtcccggctttatgcgtgcctgtcctgggctgctggtgtcgggcgtgagactcccaccgcaggccttattcccgcccagtgctggaggccagaaggctgagatgcaggtgtgggccgggccaggtccttctgaggctgaggggatctgcccaggcctcactcggctcctagtggcggccgcatccttggcatccttggcatccttggcatccttggcttgtggccgggttgcctcatccctgcccccatcctcatgcagcgtcctccccgcctgcgcctttgcctctgttctcttataacctgtccttggccagggccaccctacctctgtgtgacgttatcctaaccagtgacatccgcacagaccctgtttccagatcagagccgtccccgggttctggtgttcgtgcgtgtggggcgctagacggctctgtcctggagggcctcgcggtggctccggttgcgggtgccttctcctgcagtgcaagctcgccctggcactggccctcatgagggaatgacgcctccctgccagggtgtccccacccagctggtgcactgccgaggccattgtgagggttccgggaagtctgtggggttttcctcgagagccctgccttgagacccaccccagggctgggggtgccaccccctgccatctgcctgttctccccacccgtcctcccagctcggcctcccagcgcaggcagggaggatgcggcgtgaagatggaggcagggatggagcaatgtggccacaagccaaggaatgccaagctctgggatggttcccggggacccgagcaggcgctgggccctcagaagctgcggtgtcctctctggacatgggcgatggtgtatattgttacgagaattcaagtttttcttcttttttattcacacggggcccatgaccccaggatacagctgaggcgagccaggcataggccaggttgtggcatgaatgtcccctcacagccccacgctggcctcttaacagcgcaggcctctgtgtcctctgtcagaaatgtcctgtcccctccctgagctgagctcaggctgggtgtgtcaccccctctccaccatcttccaggcccttcccagctccagctgtgcccttttcttttttttgagacggagtcttgctctgtcgcccaggctggagtgcagctgtgcaatctgggctcactgcaagctccgcctcccgggttcacgccattctcctgcctcagcctcccgagtagctgggactatagacgcccgccaccacgcctggctaattttttgtactttttagtagagatgtggtttcaccatgttagccaggatggtctcgacctcctgacctcgtgatccgcctgcctcggcctcccaaagtgctgggattacaggcgtgagccaccgcgcccggcccggctgtgccctctgtgccgggtgcagacccccgtcctgagcctactcctctgccaccattgtttctctgccagccgcctctgtccaccacacgctggcagagggccggccaggtgctgtgggatgcagctggaggccttgaaggccggtgggatcgtcccagtgcgtgaggagaggctcctgctccctcaggtggggacaagacacggggggacccggatcccagccctgccggccgccgcaggcgtgcaggagaggcctcgcgctccagacgggctgtggcctggtgtcggcacacccactgtcctcccgcctggccacagctgctggtgcgggccctcttgtcccttagagtcacctggcacatctgtcatccaccggtgcctgctggactcccccgcagaccagaccaggtggatttcaccactcacatgcccaaagcagccccgctctcctcggcagagttgcagggaccccggccttccctggggcctggggccagggcctgaggggcactctccgcttctgcctttgtattctttcaaggagaccaaagtgccttttctcgttatagaaaacttagaaaagtcacaagtagaaagaggcaaacgtcccgtaaggaacgcacgcccgcagacatcgtctgagctgattttctttctcccgcctgtgcgtggcctgagagtgtgaggttgagctgctcaccacgcggggcagggcgctgcgcctgctcttctgccccaggaggataccggcaactctgccctctgcagccgtcactggagggtccctgcagggagcaactgtggcatcagtgtttactcctgcgagtgacgcttggtgaacatctgtgtccctggcccagtgaggggaaaggcttctgtgctcagggtgacatccagatgccagatgtagggtccctgggcacccatcgcaggttcccgcagcagctggcgcccagaatcctctgggttctcacacccccacactagcgcccgcttccctgggcccagtggtctcaggcccctttgccagtgagggaagggtctgcggtggtcacccctggaggcggtgcggccgctctctgagagcgtccttgcccgttctaagagtgggggctcttcctgctccagccgatgtcagtctggtgtggcaggaggggcttgggtgggagccgtcctgggattgcagattgggccttggggcgccaggtggctgagtcctggcgctgtgtcctttcaggatggtggatgtggggggccagcggtcggagcggaggaagtggatccactgctttgagaacgtgacatccatcatgtttctcgtcgccctcagcgaatacgaccaagtcctggtggagtcggacaacgaggtgggccctgccctgagcaggggcagcgttgggggccgggccttccccacctgccaagcctgggtcccctcacctgggtccccccagctgccccttgggctgtgtgcagtggggagggcccctctgattccctctgccttcgctcccgccagaaccggatggaggagagcaaagccctgttccggaccatcatcacctacccctggttccagaactcctccgtcatcctcttcctcaacaagaaggacctgctggaggacaagatcctgtactcgcacctggtggactacttccccgagttcgatggtgcgccgggctgcggcatggggaggggctcgcgggcagggccttactggggggagggggctgatatgggagaggggctcatacaggccgggagctctaagggagggcgtctgatgggaggtgtcatgtatgggagtggagtctcagggaagggagatctcgtatgaggggggcctgtacgggaatgagttctccgacgcgggtgtctcatacccgtgggagatctgttaatgcagggactccttatacaggaggggtctcgggtgggaggggtctcgggcagggggatctcgggtgggaggagtcttgtacaaggagggcaccatgggagggggagtcttgtattggtgggtcttgtacgggagggagttgtcgtatgggggtgtcctgtataggtgatcccatatgggaggggtctcacaggaagggttcacgcacactgccagcgcagccccgtggggaccttggtggtagtccctgcatcctcctctgtgccctactgcccccaccctcggacccgtccctccctacgtggcccctgccccacggggtgtgtcagggcagctgagcactgagggtcttcacatgcccagccctctctgggcctggggatggcggccaggggagggtgttgtgtgccctcgtctgtgtggtcagtggctgccgttagtgctgtcaccactcagagctgtccctgccaggcacagtgaggccctgggcagctctggcgccctcatttccaccccggatctgtgctcctcccgtgagtctcgggtgtcatcttcgggagggcccctcagggtgccctgcctctggatgtgcagcgagagggaggggtctggcacacggtatagcctcggccgctggctgcaggcgcagggccctgctgtccctgggcaggggagtggcggggggcgctgcacctgctccagccgcacgtggcccctgcccagcagcctgtcctgtgggctcagagagccctggtggggggaggccaagggactggggcatagacccctgtcccaccagtccccagagcagccccttgaacacccccaggggcctttccaccggggcaggcaggagttactgggcgggtcgcctgcattgtccagggtggtggaggggcaggggtggccggtgggaagcagcgcccctgctggagcccctggatgtctctgaggcctggctgcagcaggggcaccgtgggtgggtgggggccactgttcctgctctgtaggctctgtgcccagccctgggggcctctcctctcaccctgggccttcgcagggcagccatgccagaggcctgccctggaaggctgtggctgtggagctgagtggatagaggccggcagagggctgagcagagggagcagcggtgggtgcagagccccaggttggaggcctgggccgtgacagtagtgccctggggctacagtgggattggcaccgcagctcacctggggagggaggggagctgcggcccgtcaggcatgcagtgggctgggggtcgagctgggtgggccgtgggccttactcgctcatcccctgggagtgacaaaggggcccacgagtcccttgccctgggccgggctggggcacagcctcaccctctgccctcccccaggtccccagcgggacgcccaggcggcgcgggagttcatcctgaagatgttcgtggacctgaaccccgacagcgacaagatcatctactcacacttcacgtgtgccaccgacacggagaacatccgcttcgtgttcgcggccgtgaaggacaccatcctgcagctcaacctcaaggagtacaacctggtctgagcgcccaggcccagggagacgggatggagacacggggcaggaccttccttccacggagcctgcggctgccgggcgggtggcgctgccgagtccgggccggggcctctgcccgcgggaggagatttttttttttcatatttttaacaaatggtttttatttcacagttatcaggggatgtacatctctccctccgtacacttcgcgcaccttctcaccttttgtcaacggcaaaggcagcctttttctggccttgacttatggctcgcttttttctaaaaaaaaaaaaaaaagaaagaaagaaaaaaagcaacgaaacataaaacacacaagcgccccgtgcccccagtgactctgggcctcacagagcccccgccagccagcatggggccccgccctgcagccagtcacgcgcccccacaccgcagccccccgtggctgtccttccaaccccacgtgctttttctttctcctgcccgcttcttttcttcatcacaaaaggcgtggagactcggagacggacgtttttccccttttttaagttattgacgcccagcgcgcctcgcctcttcacccatcaacgctgtgctttgcccactggactcctgaagagggggtggggggctccctcggtcgcccaccctgggaagtgcctaaccttttattttattttatttttttgaggaaaaagaacgcctgactcacaggttgaagaaacaccctgggccctctctcatggccgggttccccgtccctctgcagaggctgggaagggtccccgggctggagccacgggggcttctctgggctgtgcctccggggccaacactggctgcttggggctgcccggggactccagagggctgcacggccaccctgccctggctagagcgcaccccaccggagcccacgtgggctgggcggctggagggatggtcccccggtgacactgggagaaaggccacttggatgggggcgtttctgttttgttccgctttgtgatgtcaccaatttggaaacagcgagggtgggtggggacttttacagaatattctcaggtgtgtacccgagaggcagagagagggacgtggccggcagctctgtgcgtggccttgtcccaagcacttgcgcccgcccccgagcgccgcccccggggagcgggaagccagcactcgcactttggccaggggcgcgtggaaggtggtggcaggcaccggcctgggcagcttccaggcctggctggccacgaccacggcccgagggggagcccgccaggccacgccgcactgagccacagccccgggggccgcctcccggggccccttgaggcactgaggcaccgagactggttctccccgagagactcggaaggtggggaacgaggggactgtgtttggggaggtggctttttcgtctgctgttgactgaacactacagcgccctgtggttccgggcttcgcacagctgtcccagggatggatcgcctgtgctgccttcgcccgccgccacaccgggaccctgcacggctgcttctggcctcgacagatgacaaaagaaacagccccaaaatacgaccactccaaccagcagttcccgcctgcctgcccgccactgtcaggcctgccctggcctcctcgtccgcagggctgtctgctggcttctgggggcagaagagcggggagccccgtggaagggtcaggggagaccaggtcagggcagctacatttctggtgatcagccccatggggagacggggctggcgggataccccccccccggcttccccacaccacttctgtctcacccggaagcgtcctttttttgtgccaggtgtctacctaagagggttggtgccagaagccccccatggcgagtgctggggcccggcggtgccctgggggagcagatggggccacccctggcagggccgctacaaccttttccagcagcggagccctctggggggcctgtgcttgtggcatctctgagggcctagattgcacaaggtgacctggccgtggcctgagggtggagtcgcccagcacgcaggccggggcgctgcggggctaagtattaggccttcccagggagggggcgtgccaagcatcccagagccgggctgggaccgccaaaacgtcgtggcctggatcctctgggtctgagtgcctgatcccctgccccccaaaaaagcagaggtaggtgttgcaggcccagggcaggggtgcctgccccaggagagtcccaggcagtggttctcgtgccagtggcacccaggggcaaggacagccaacccccacccttgccacgtgtggggccacgtgggcatgtggggtgtgtgtttttaccttggtgaatctcacctgccaacgatttctcgtgagtgccgaccaccttctccgaccatgttacgcccgggcggcagcagcccccggccactgcaaacccatgccctgggtcccccggctcccccagggaggcatccccgtgccaatgtcccccagtggtggcagcagatcctgtggccggcctggcggacgggacccagtgatacttgtatattacacagtcctgatttcagacaatttcaaccttaatctatttaaaaaagaatattctatacaagctgtttttaagccttttaccatttgaaatgcatgtgttgtgcgcgttggggatgggaggaggggctgaggagcggctcagtgtcacctcccacagccaccggccctgacccttaatccagacaccgatggaagtcgacttttcatatctttctcctgaaatgaactctgttttaaattggaataaattttgttcctaaatgctggcggcccccttctggtttatttcctgttgtccttcaaagggggctggggggaagtgtgcagaggcctggcccccaggagccctggagttacctagggcattgcctgacctcagtggggccgcctgggtgcctccgcacggtgtcccggggcccctcccctgtcatcttgtttgacccttcacttcaagttcatttcactagcaccaggccagagcaacctgcttgggaaatgccaccttgtttgggggctggggacaagggagtgagacggggaggagcccaggtcccaggccagcctgcccctcaccttccagggcacctgtggggacatcatgccctccgggcctccgtttctgtaagctgcggatgtgggacctctgcagccttccttcagttattttttccttttgaaaaaaaattgtaaaatacagataaatttctaagtgcacagctcagcggcattaagtgtatccacacggttgtgcagccatcaccaccatcctctccagaacttgtatctccccaaattgaaactctgtccccatgaaacactccccgtccccctccccagcccctggcaccccccatcctaccttttgtctccctgaatctgacagctctatggacctcctaggagtggaaccatgcggggtgtgtccttctgtgtctctggcatctctcactgagcatgatgtcctcaaggtgcatccacgctgaagcccatgtccggattcccttccttttcgtggttcagtaatattccactgtgtggatgggccacgctgtgttgatccatctatcatcgatggacgtctgggtggtttccaccttgtggctgttggcagtcgtgccgctgtgcacctgcgtgtgcaagcttctgtttgagtccctcctgtctgtcctcgtgtgtgtgcatccagaggtagcattgctgggtcctctggtctttctttttttggatgcaccttgaggagtctcgctctgtcgccaggctggaatgcagtggcgcgatctcggctcactgcagcctccacctcccgggttcaaccaattctcctgcctcagcctcctgagtagctgggactacaggtgcctgccatcacgcccggctaatttttgtatttttagtagagatggggtttcaccatgttggccaggatggtctccatcttgacctcatgatcctcccacctcggcctctcaaagtgctgggattacaggcgtggaccaccgcgcccggcctctattttaattttttggggagctgcccgacttttccacagcagctgtgccatgtcacatcccgccagctgtgcacaagggtgcgatttccccacatcctctttcagtttcattgagtccgataggcctgtccgtcaggcttaaggccccttgctgtgcccgatgctgccccagatactacagtgcagcagagaaggtggcacttaccagcacgacttcacctaggaagagaaatggagcagggaagtgggacaggatggggagatggtggctgttgcttttcttttctttttttttttttttgagttggggtctagctctgtcacccaggctggagtgcagtggtgcggtctcagctcacctcaacctctgcctcctgggttcaagcgattctcctccctcagcctcccgagtagctgggactacaggcgcccaccaccacacccggctaatttttgtacttttagtagagacggggtttcaccatgttggccaggcttgtctcaaactcctgacctctggtgatccgcccgccttggcctcccaaagtgctgggattataggcgtgagccacagcgcccagccaatggtggctgattctggtgggctgttcctggtgggctgtacaggaaaagcctgataaagtggtgcgtgagtagcatcctgggagacaggaagggaaggagccatgctgtggcctgagggtgagccaggcagaggcacagcttgtgcaaaggtcctggggcaggaccatgcctgatgtgttggaggagcagcgaggaggcccgtgtggttggagcggagggagggggggagggcagggagggttggtcttttaccctcagagggaggtgggagccctggagggacgcaggcagagcagagacaggacctgacaggtgctcacaggcggcctctggtggctgctgctgggaggacagacgggtgagggcgggagccaggggacaaggctggtgcaggtggcaatgataggtgtggatcagatggcagaagcagaggtgggtgagtcagctaaggggcgttgagtgctggggggagctgggcccggcatggatatcgcaggtgcatatagtgcccccagtggccagcaggagtcgccccagacagctccttgcctgcccctagccccctgcccatcctaaaaggaaaaccgaggcacagagggtgagcgtcttgcctgaggcagcttgccctgacggctggccagtccttcctaggtcctgacaacagccctagcctgttcagctgggcaggcagctccagcaccccccgcagaatccataggacccggagcaaaatgaaaacacagggtccctgtttaaaaattccgaggaggccgggtgcagtggctcatgcctgttattccagcactttgggaggccgaggcgggcggatcgtttgaggtctggagttcaagaccagcctggcctacatagcgaaacctcgtctctacttaaaattcaaaaaattagccgggtgtggtggcgcatgcctgtagtcccagctacttgggaggctgaggcacaatgatcgtttgaacctgggaggcaaaggtagcagtgagccgagatgatgccactgcactctagcctgggcgaagaagtgagactcctcaagataaataaataaacaaataggccaggtgcagtggctcatacccatctctactaaaaatacaaaaattagtcgggcgtggtggctcacgcctctaatcccagcattttgggaggctgaggtgggtggatcacttgaggtcaggagttcgagaccagcctggtcaacaaggtgaaactccgtctctaccaaaaatacaaaaattagctgggtgtggtggcgggcgcctgtagtcccagctactcaggaggttgaggcaggagaatcgcttgaacccgggaggcagaggtttcagtgagccaagatcgtgtcattgcactccagcctgggtgacagagtgaaactttctctaaaaaaaaaggtggctgggagtggtggctcacgcctgtaatcccagcactttgggaagccgaggcgggcggatcacgaggtcaggagattgagaccatcctgactaacactatgaaacccggtctctgctaaaaatacaaaaaattagccgggtgtggtggcgggtgcctgtagtcccagctacttgggaggctgaggcaggagaatggcatggaccggggaggcagagcttgcagtgagccaagatcgcaccactgcactccagcctgggcaacagggtgagactctgtgtcaaaaaaaaaaaaaaaaagcaaaatcttagagttattggaagtgtaaattggtgcatgcactttggcaaaagatagttaatatctaggaaatactttataacccagcaattctaccattgggtatttacctacagaaagccacacatataatcacaaaagacatgtaccaaatgcccatagctgccctattcattacagccccaaactaaaatttaaccaaatgcccatcaacagtagaatggatgaatagattgtagtttatttatccagaggaatagtctatgacaatcaggattaatgaaccacaaccatgtacacaatatgagttaatcacacaaacatcacgtggaatgatagaagccagatgtacctgaactcattttatgtaattctgtgtgcataaagttcaaaactggcaaaaattcaccatgattttgaggattttttttttttttttttttttgagatggagtcttgctctgttgctcaggctggagtgcaatggtgcaatctcggcttactgcaacctctgcctcccaggttcaagtgattctcctgtctcagcctcctgagtagctggaattacaggcacctgccaccacatctggctaatttttgtattttagtagtgacagggtttctccatgttgtccaggctggtcttgaactcctgacctcaggtgatccacctgcctcagcttcccaaatttttgggattacagctgtgagccactgcgcctggcctgaaaggtctaatattttaagcttctactcccaagaaattagaaagagaagagcaaactaaacacaaactaaagagaaaataatagaatagaaatcaatggaataaaaaatagaaaaacagtatagaaaaatcaataaagccataagctggttctttgaaaaaaattaatgaaattgataaacctttagtctagattcaccctccagagagaaaaagaaattaccagcaacaggcacaaaggaggggatatcattactcaccctaaagaaatttaaaggataataagggaatactacaaataagtgtatgcacataaatttgacaacttaaaggaaatggaccaatttctcgagagacacaagctaccaaaactcactcaggaagaaacagaaaacctgaacagtcctatacgtattaaagaaacagaatttgaagttaaagtcttctaaagaataaaacatttgggaggctaaggcgggtggatcacgaggtcaggagatcaagaccattccggctaacgcggtgaaacctcgtctctactaaaaatacgaaaaaattagctgggcatggtggtgggtgcctgtagtcccagctatttgggaggttgatataggagaatggcgtgaacccgggaggcagagcttgcagtgagccaagatcatgccactgcactccagcctgggtgacagagcgagactctgtctcaaacaacaacaacaataaaaaatgaaaaataaaataaaactttaggcccagatggttttagtggtgaatcctatcaaacatttaaagaaaaaataacatcaaattcttcacaatctgtttcagaaaatagaagaggatggaatacttcccaactcattttaagaggccagtattatcctgataccaaaattaaagacagtacagggaaattacagatcagtatactcaaaaacatagatactaaaatccttaacaaaatattagcaagtgaaataatgaaatccagtgatatacagaaagaaaaccacctcaccaccaggtggcatttatcccaggaatacaagacaagctcaacattggaaaatcagtcaatataacttgccatattaacagacgaaagaaaaactacatgatcatatcaatagataaagaaaatacatttgatacaattcaactttcattcatgataaaaattctaagcaaattaggagtagaaaggaacttcctcaacctgataaagggcatctgtaacaaaccacagctaaacaacaacaacaaaaatactattggccaggtgtggtgtctcatgcctgtaatcccagcactttgggaggctgaggtgggtggatcacctgaggtcaagagttcaagaccagcctggccaacatggtgaaacccccgtctctactaaaactacaaaaattagctgggcgtggtggcacatgcctgtaattccagctactcgggaggctgaggcaggagaatcacttgaacatggaagggggaggttgcaatgagccaagatcacgccattacactctagcctgggcaacaagagcaaaacgctgtctcaaaaaaaaaaaaaaagaaaagaaaagaaaaaaaagaaaaaaatatgtacacaaatgtatatagcagctctgttcatgatcacctcaaactggaagcaaccaaatgcccctcacggttggataaaggggaatgcatccacacagggaaataccactggaccatccaaagcaacgaacttctgatacactcggcaacacagaggaatcgcaaatgctaactgaaagaagccagtctcaaaagctactttctggaccaggtgcggtggctcacgcctgtaatcccaacgttttgagaggctgagctgggaggccaggagctcctgagcagcctaggcaacacagagaaacccatctctacaaaaataaaaaaattagggccgggcgcggtggcatccgcctgtaatcccagcattttgggaggctgagataggtggatcacttgaggccaggagttcaagaccagcctggccaacagggcggaaactttgtctctactaaaaatacaaaaattaggcgggcacggcggctcgcacctgtaatcccagctactcgggaggctgaggcagaagaattgcttgaacctgggaggtagagcttgcagtgagctgagatcgtgccactgcactctaacctgggcgacagagtgagactctgtctcaaaaaaaaaaaaaaaaaaaaacattagatggtggtggtgcgcagtactcggaaggctaaggtgggaagatcgcttgaacccaggaggtcaaggctgcagtaagccatgattgcaccactgcactccagcctaggcgagagagaagggccttgtctcaaaaaataaaataaaaaacatagcaacagctatttccctcggagcgagcgggggcggcggcctgtgcagcaacggccaggatcaaggcccaagaccttctcgggaagaaggaggaggagctgctgaaacagctggacgacctaaaggtggagctgtcccagctgcgcgtcgccaaagtgacgggcggcgcggcctccaagctccctaagatccgggcgcggtggctcacgcctgtaatcccagcactctagggaggccgaggcgggcggatcacgaggtcaggagatcgataccatcctggctaacacagcgaaaccccgtctctactaaaaatacaaaaaaattagccgggcgtggtggcgggcggctgtaatcccagctactcactcgggaggctgaggcaggaggatggggtgaacccgggaggcggagcttgcagagagccgagatctcgccattgcgcttctgcctgggcgacagagggagactctgtctcaaaaaaaaaaaaaaaaaaaaaaaaaaaaaaagatccgagtcgtccgcaaatccattgcccgtgttctcacggttattaaccagactcagaaagaaaacctcgggaaattctacaagggcaagaagtacaagcacctgcacctgcggcctaagaagacacgcgccgtgcgccgcccgctcagcaagcacgaggagaacctgacgatcaagaagcagcagcagagcgagcagctgtccccagtgcggaagtgcgcggtcaaggcccgagtggcgcgttgtcaataaagcacagctggctgagaaaaaaaaaaacaaaaaaaaaaacaccaaaacaaacaaacaaacaaaaaacacagccacaaagagccaatccacggtcaggagggagttgttccggtgatggaactacattctgtatcctgtttatagcagtaatttacacgaatctctacagctgttaaaactcatagaaaccaggccgggcgcggtggctcacgcctgtaatcccagcactttgggaggccgaggcgggcggatcacgacgtcaggagatcgagaccagtctggacaacatggtgaaaccccgtctctactaaaatacaaaaaaaattagcccggcgtggtggtgggcacctgtagtcccagctattcgggaggctgaggcagcagaatggcgtgaacccgggaggctcagcttgcagtgagccgagatcgtgccactgcactccagcctgggtgacagagacagactccgtctcaataaataaataaataaataaataaataaataaactcatagaaccatacaccaaagaaagtaaatacaatgctacataaatttagacaattaaaaacaagatctttttttgggggggacagacccttgctctgtcaacccaggctggagtgcagtgggtcaatcatagctcactgcagcctcaacctctctggcctaagcaatcctcccaccttagcctctggagtacctgggaccacaggcatgagccaccacccccggctaatttattttattttattttttagaaatggggtctcactgggaaggtggaggttgcagtgagctgagaccgagccattgcactccagcctgggcaacaataacaaaacaccgtctcaaaaaaaaaaaaaaaaaaaaaaaagaaagaaagaaagaaaaaagaaaaaaagagatagagtctcactatgttgcccaggctggtcttgaactcctggggtcaagcaatcctcccacttcagcctcccaaagtgctgagattataggcatgagccaacatgcccagctgaaatagatcttattagcaaaaaataccccccaaacccggaaataaatattaataccacagaagtcagaatgatagttactgctgggaaggtagagattactatgaggaaaacactaggggtctttgtggggctaaggtctttttttttttttttttgagacagagtcttgcttgtcacccaggctggagtgcagtggcacgatctcagctcactgcaacctccacctcccaggctcaagcaatactcctcccccggcctcccgagtagctgggattacaggtgtgcaccatcacacctggctaacttttctatttttagtagagacggggtttcaccatgttgtccaggctggtcttgaactcctgacctcaggtgatctgcccaccttggcctcccaaagtgctgggatgacaggcgtgagacaccgcgcccggcctgaaaatgtccttagtcttggcctcagtggattctgtggataccggcttcacaacaatttattaggtaatacattcaggttttatgtgttttctgaaagaaatattttctacacacacaagctcaccctggtgttcccagctgagctaataatacacgacaaatgctcagcatgtggcaaggaagtagctcagcccgtttagggaaccgcaagggaggtttgttcagcagctggagaagtgggcagagcctgggccctggatccagggagccggctcattaattctgaagccagcgggagccacagagggtctgccaccctggtccaggctgtgaagatggcgggtgctggtatcctgtccaaaaatgccgcagggagatgctaggagagtggccccctgggctcaccctgtggggcctgtggctcagcctcgtctcccagttttgctggtcatttctgtttcaaccatcctggaagatctgcacggccatgacctatttctgcgtttctttgcctgtcctgggtgggactgcccctcgttgctgctatccggttgggggcgggaaggtgggtggctgggtgggcagatggcacctgccagccccagtgaccagatgggggcccctatcgtacttcccatctgtcattcgttatgaatcaacagtggagaaaaccacacgtttgtgctgagctggtgaagctgcgtcaacggctgtcaccgagccctggtgtctgggaggaggtggggacggtggctgccaatggctgtgtggccctgggcacgtaattcgccctctctgtgccttgccctatctgtaaagggaccagaggcccccgaagtacaagaattacgtgtatctcttggggaggagagttttgatccagaactttctagaattttctacagcctgtcaatgggggtggggaatcttcacccaaacactctggctctgagtacctaggaagcagcaacgtttctaccaagctgccagccaccagcccacccctagggccctgaagtcccagagggatcaggtcagggcggcctcatggcactcattgggaagatctccttgaccagtgaggtccactcccaaagtccctcttacacccgatctgcctgtctgacttctgatcctgaatatcacttgtctgtgcgacctttgttgatccatttagagcaatgaccttgaaccttccccaacaacatctctgcttaatttttctggcagaatttttcaccatccaacgggctcaggtgtattaaaaaatatatatattttacacgtgtgtgtatatatatacacacatatatatttttatgtataatatacatatatgtatattaaaatgtatacttttatgtgtgtatatatgtatgtgtatatatgtatgtgtgtctatatattgtgtatatatatgtatgtgtatatatgtatgtgtatatacatatatgtatgtgtgtctatatattgtgtatatatatgtatgtgtatatatatgtatgtgtgtgtgtgtatatatatacatagagagagagggagagttttgttttgtttgtttctggagacagggtttcactatgttgcccaggctggagagcagtgttatgatctcggctcactgcagcctccatcttcggggttcaagtgattcccttgcctcagcctcccaagtagctgggactactggtgcgtgccaacatgcccaactaatttttgtattagtagagatggagtttctccatgttggccaggctggtctcaaactcctgacttcaagtgatcctcctgcctcggcctcccaaagtactttgattacagatgtgagctcccgcactcacctggccaaattttttattcttttattttttattttttttgagatggagtctcacttcgtcgccaggctggagtgcagtggcacgatctcagctcactgccacctctgcctcccgggttcaagcgattctcttgcctcagcctcccaagtaggtgggactacaggcgtgcaccaccacgcccggctaatttttgtatttttagtagagacggggtttcgccgtgttggccaggctggtctcgatttcttgactttgtgatctgcccgccttggcctcccaaagtatagggattacatgcgtgagccaccaggcccagcctaaaatttattttattatctgttctttaactagaaccttaggtaaggaggtctgggatctgtgtctcttggctaccgtgcctggcacacagttggcgctccatgaatgcacgcacaatgaagggatggccctgcctggaatctgcctggtaggcgtctagactctggggccccgcaggtgagggataggctcccggctctgccttgtgccagccccaccggtcactcccctgctctatgcctcaacctcctcatcagtcaaacagggatgacagtagtaactatacagggtgatgtgagtgtaaaaccagctaatgtgagccaaaacccggctaatttttgtatctttagtagagacagggtttcgccatgttggccaggctggtttcgaactcctgacctcaggcaagctgcccacctctgcagggtggatcacctgaggtcagggcagagtcgctggaaacagtccatgacacctggcctgagctgtttcttaaaaatatatcagaagggccgagcgtggtggtttatgcctgcaatcccagcactttgggaggccgaggcgggtggatcacctgaggtcaggagtttgagaccagcctggccaacgtggtggaaccctttctctactaaaaatccaaagttagcccggcgtggtggtggatgcctgtaatcccagctactcgagaggctgaggcaggagaattgcttgaacctgggaggcagatgttgcagagtcaagatcctgccactgcactccagcctgggcaataagagtgaaactctgtctcaaaaaaaaaaaaaaaaatatatatatatatatatatatatatatatatatatatatatatatatacacatatatatatatacacacacatatatatatgatatatatataatgtatcagcagtagcacgggtctgacggttcctgattggctccgaggagggggacagctccgggtgaagcctgaggagaatccgccccttctccagaaggaggaagaagggccctgctggtcacacaggacccagtctgcggtgggggttttcccgccaccgccccgccctccctggggcccccacctcaccctctcctggcacccttcaccgtcaacctgtcgggccgggtctgagcaggtctggaggtgggcggggagccctggcctccccacctcctcccgtccccaccctgttcccagcactcaagccttgccaccgccgagccgggcttcctgggtgtttcaggcaaggaagtctaggtccctggggggtgacccccaaggaaaaggcagcctccctgcgcacccggttgcccggagccctctccagggccggctgggctgggggttgccctggccagcaggggcccgggggcgatgccacccggtgccgactgaggccaccgcaccatggcccgctcgctgacctggcgctgctgcccctggtgcctgacggaggatgagaaggccgccgcccgggtggaccaggagatcaacaggatcctcttggagcagaagaagcaggaccgcggggagctgaagctgctgcttttgggtgagtccagggtcggtgggcggtgggtggtgggcagtgggcggtggccagccggcaggggtgtcggggcaaggaggcggatcaggctaggtcagacattggcatcgtggagccgtcgcctcctcccagggaatggggagcctggaacccattttccagatgagaaagactgaggttcagagaagccaagttccttgtccaacgtgcgaccagcggccaggtgcccaggcctgtccactgtgtggggcatatacaatagcagacgtggctctaccgggcccctgccgggcaggcccagcacgccctacctgtctgtgtcatggcgagggaatgatgagctcaggtgtgcaacccgttctggccagcccacccgtaagggaggggccggctccagcctctccttcaccaggacgctccctctcgcctttacctccctgccatggctggagagggcttgtctagggctcctttgggggctagaaaggatggattgattggttcattggttcattcattcattattcattcatttaagatttattgggtagctcccaggaacgaggcagccaaacaggggaagatatttctgtcttcctggatctcatttcctgtgaaggagccaagacatttagtctgtaaactcataagcagataaaataattctggcaacaagaattatctaggagaaaacaaaacagggtgatggcttccatgcggaggcttcagatgggggagtcgacgtcagtaacggttcaagattctgaactctggctgggtgcagtggctcaagcctgtgatttcagcactttgggaggcccaggcgggtgggatcacttgaggtcaggagttcaagacacagccaggccaacatggtgaagccccgtctctactaaaataccaaaaatttgccaggcatggtggctcatgcctgtaatcccagcactttgggaggccgaggtgggtggatcacaaggtcgggagatcgagaccagcctgaccaacacggtgaaaccccatctctaccaaaataccaaaaattagccagatgtggtggtgcgtgcctgtagtccctgctactcgggaggctgaggcaggggaattgcatgaaaccaggaggtggagactgcagtgagctgagatcatgccactgcactccagactggcgacagagtgagacgccatctcaaacaaataaacaaacaaacaaaaccaaaaattagctgggcatggtggcacacagctataatcccagctactcgggaggctgaggcatgagaatcgcttgaacccaggaggcagaggttgcagtgagctgagatcgggccactgcactccagcctggatgacagagcaagactcattgtcaataaataaataaatataaataaaataaataaataaatcatgcctgtaatcccagcactttgggacgccaaggcgggcagatcacttgaggccaggagttcgaaatcagcctggtcaacgtggcgaaaccccgtctctactcaaaatacaaaaaaattagccgggtgtggtggcatgtgcctgtaatcccagctactggggaggctgaggcaggagaatcgcttgaaaccaggaggtggaggctgcagtgagccaggattgcactattgcaccccagcctgggcaacaagaacaaaactccgtctcaaaaaaaaaaaaattctgatctctgaaacctcggggtcttctcattcccgtagcttgtttccccaattacctttccctgattatggccccgttggcctaagcccgggatgctagcctgggagggtcttctgggatccccgagctctgggttgggggctggagaaggtctcaagtcttctggactcgcgtttgtctgccccgggcaaagagcttgatcatcccgtgatggttgctatcgtcctttcctcgttcagtgggaagaggccgcccgagaggaaagagagagaacatcgagtgggatggtggggacccccaggaactgcaccttcactgggggccctttctttcttttttcttttcttatttttatttttatttttttgagacggagtcttgctctgtcacccaggctggggtgcagtggtgcgatctcaactcactgcaacctccgcctcccgggttcaagcaattctcctgtctcagcctcttgagtagctgggattataggcacgcgccaccacgcccagttaattttttttttttttgtatttttagtagagatggggttccaccatgttggccaggctggtctcgaactcctgacctggtgatcaacccgccttggcctcccgaagtgttgggattacaggcgtgagccaccgcgcccagcctctttttttttttttttctttttttttagattgagtcttgctctgtcccccaggttggagtgcagtggtgagatctcagctcactgcaacctccgcctcctgggttcaagtgattctcctgcctcagtctcctgagcagctgggactactggtgcgcactaccacacctggctaatttttgtatttttagtagagatggggtttcaccatgttggccaggctggtctcgaacccctgacctcaggtgatcctaccaccttggcctcccaaagtgtggggattacaggcgtgagccactgcacccagtcaagggccctttcaactctagccttgatccctcttactgaacgagataaaagaatatctcagcagggcatagtggttcattcctgtaatcttagcactttgggaggcctaggtgggaggattgcttgagcttaggagtttcagaccagcctgggcaacttagcaagacccagtctctaaaaaaaataaataaataaaataattagccaggcatggtggtgcgcaactgtagttccaactacttgggaggctgaggtgagaggatcacttgagcctgggaggttgaggctgcagtgagctatgatcatgccactgcactccagcctgggtgacagagcaaagctgactctgtctcaaaaaaaaaaaaaaaaaaatgccgggtgcagtggctcatgcctgtaatcccagcactttgggaggccgaggtgggcagatcatgaggtcaggaggttgagaacatcctggctaacacgatgaaaccccgtctctactaaaaatataaaaaatcagggctgggtgcggtggctcacgcctgcaatcacagcactttggggggccgaggagggtggatcacgaggtcaggagatggagaccatcctggctaatgtggtgaaaccccatctctactaaaaatacaaaaattagccaggcgtggtggtgcgcacctgtagtcccagctacttgggagggtgaggcaggagaattgctctaacttggaggcagaggttgcagtgagccaagatcacaccactgaactccagcctaggcaataagagtgaaactccatctcaaaaaaaaaaaatctatctatctatctatctatctatctatctatctatctatatttgacatattaatgtgtcatattatgtcacattatgacgtatcatatcgatatgtcttattattttaaataaatagggctacttaggctatctacttcttcttgtgtgggttttgatcatttgtgtctttcaaataatttgtccattttgcctgtgttatcaaatttattggcataacatttataacgttcccttgttctcctgctactgtctgtaggatctgcagtgatgtcctctcttttgctcttggtatcgatcatttctgcctttgctcatttttttcttgatctatcaagctaggggtttatcacttttagtgctctttcctcgaatacctcaaggtcatttatccctgacctttgcctggctggccctttcactccatgtaggtctcaacccaagtgtcgcctcctcagagaagtcttccctgactaccctagctataaagacagtcctatcttctccttccccttactctgtttgatttttcttcctggccctcactatttgttcacttgtttattgtttatctctccagctatacagcaagcaacaaaagggtagggaccacatctgtcttcttcatccctgtgtctccagcatctagcacaggtgtacaatgagcctgccatatagtagatgctcaagaaatgctgaatgaatgaatgaatgaatgaatgaatcatttttggggagaacttcccccagacactgtatcatatcttcctggagctgggaaagtcccttccacataccactctgggcactactcagccagcctcaaagcaggaagccccttctactgatggagggcaggggatgacatccatgtccccaggcactgatgtagcactgtggactgtggtttaaaccacctcatccctggagacaggtctgagggcaacctccagacctctgtcccttcttggaaacaggaattgaatccaaaagctgttttttttttacctggaggtggctgatccttttgaggaagatggcaaaaaggaccagggtgggggtgggtctgtccctgacatgaagcaaccctcatattggggaagggggagagtcagaatgaagccgtgagccgggtatggtggcacatacctgtagtcccagttactcgggaggctaaggcaggaggattgcttgagcccaggagttcaagaccagcctggacaacattgcgagacccagtctctaaacaaaaacaaaaaaagaaaagaaaagaaagtgaacaacaacaaaaacaggaaaataaagctgtgaaagggaccagttatgtccttagcactttaaacattttattttttatttttatttttgagacagagtcttactctatcaccccggttggagtgcagtggtgcgatctcggctcacggcaacctttgcctcctgggttcaagcaatcctcttgcctcagcttcctgagtagctgggactacaagtgtgcaccatcatgcccagctaatttttgtatttttagtagagacggggtttcaccatgttagccaggctggtctcgaactcctgacctcaggtgatccatctgccttggcctccccaaagtgacgagattagagatgtgagccattgtgcccggcctgttcttagcactttgaggcaggcactcctagtttcccccaaaggataaactgaggctcagagaggcagagcgacttgcccaaggtcacacagctgagactcgcacctagaattctggttccaaagtccatgctcctgactgccctgttcgcctgccttgggggacagaaacaccacagaaccccagtgccagatggggaaaatgaggcccaaggaggcagcaggattgattgggggtcagcagctagtttgagccagagcgggactgagaggccgagcctcctgcccctgcggctgcctggcctggctccccacttccccagcagctgcgtttcctgtgagggcctggtgctggactctgtgcacatagctggctccagttgccttgtgatgactggggcttggcacggttaacccagttccttcctggcatctgccggttccacttcctcctgtcctcctccgtgcccaggaggaagcaggaacttcccgtctgggccgcatggcctttgggggtatcctaaaacagatcactcccaccatttctatccaggagctgggggatgtctgggggtcggggggcaatggagaggtcccagaatcctttgtggcttcaggacagcaatggattgcaaagagggggttctcacgcagctcttcaggcttcgggtgatgacccatccctgagtcatcaaatctgtgtcgcgggtggcaacaggattatcatttatttcctataacaaagcagaagaggaaaaaaaaatcagtgcatcacaaaataaagccaactgttgcttgccaagacttatgtttgttctctgcactttggggcaaactaagatctgagagttggaagacaactgggggacaggagcccaaaaggtccagtcctggctgggcgcggtggctcaggcctgtcatcccagcactttgggaggctgaggaggggtggatcacttgaggccaggagttcaagaccagtctggccaacatggtgaaacctcgtctctactaaaaacacaaaaattagccgggtgtggtggtgcacgcctctaatcccagctgcctgggaggctgaggcaggagaatcgcttgaacctgggaggaggaggttgcggtgtgctgagatcacaccattgcactccagtctgtgtgacagagccagactctatatcaaaaaataaaaataaaaacaaaaagtaaaaaaaaggaagaagaagatctgagggttggaaggcaattgggggacaggagctcaaaaagtccagtcatcggcagttgggctcaatgccacaccccaaggagctgtcgagcctcccagactctgtaaaaacattgctttaacagacgtgttaatgacacctaccccagctcgactggccgtgtcccattttgttggtgaaggactcacacgaccccaagtttactcccctggggttccacttgctgtgtgacccaaattaagtcactaaacctctctggtcctctgtgtctcatctgcaaatgggaaaatcatagaatctgtgaggattaactggggatccgtagagtctctgggctcggggttgggaagacggtaagatttaaatcatgctagctgtgatttttattatgattgttataatcattcaggcagggtaaaggaacctccaggtataataatttagaaacccataagctcaaggtggctcatgcctgtaatcccagtactttgggaggccaaggcaagtggatcccttgaggccaggagttcgagaccagcctggccaaaatggcaaaaccctgtctctactaaaaatacaaaaattagccggacacggtggtgcacacctgtaatgacagctagtctggaggttgaggcaggagaatcgcttgaaacccatgaggtggaggttgcagtgagccaatatcaagccactgcactctagcctgggtgacagagtgagaccctgtctcaaaaataataataataataaaaaataaaagcccataggctctagactcaaacagaactgagtttgaatcccagtctgccactcaccaggaccattgaaggaattgtgcgacccacagcaattccctcaacggccccgagactgagtttccccacatggaaacagggctaagagttgtccctctcttggccaggcgcagtggctcacgcctgtaatcccagcactttgggaggacgaggcgggtggatcacaaggtcaggagatcgagaccatcctggctaacatggtgaaaccccgtctctactaaaaaaaaacaaaaaaaattagctgggcatggtggtgggcgcctgtcgtcccagctgcttgggaggctgaggcaggagaatggcgtgaacccgggaggtggagcttacagtgagccgagatcgcgacactgcactccagcctgggcgatagagcaagaaagactccctctcaaaaaaaaaaaaaaagagttgtccccctctcgtggtgaggctcaggacagatggtgggactccagctcttagctcaccagggacacccagtcaagggccagcaagctcacaattccctctgctactagccccaaatagccaaagctccaaaaacttgatggtcccccatagtgtctccatgagaaactcaaagaaacgggtgggaggatgtttgtttattgcactgactcccattcctacattccgctgcaggaatattagtgagttgacatgtccccatcctaacatgcaataaattctggaatctgaagctctcacagctctgcatcagagaatttcagattgtggacctgggggatgttgtcgtttgagtagtttgtttgtttatttatttatttatattttatttatttttttttgagtcggagtctcgctctgtcacccaggctggagtgcagtggcatgatctcggctcattgcaagctccgcctccccggttcacgccattctcctgcctcagcctcccaagtagctggaactacaggcgcccgccaccatgcccggttaattttttgtatttttagtagagacggggtttcaccgtgttagccaggatggtctcgatctcctgacctcgtgatccgcccgccttggcctcccatagtgctgagattacaggcgtgagccaccgggcccggccctttatttttattttttttgagacagagtctggctctgtcacccaggttggagtgcagtggcatgatctcggctcactgcagcctccgcctcccaggttcaagcaattctcctgcctcagcctcctgtgtagctgggattacaggtgcgcgccaccatgcccagctaatttttgtatttttagtagagacagggtttttgtatttttagtagagacagggtttcaccatgttggtcaggctggtctcgaactcctgacctggtgatctgcctgcctcagcttcccaaagtgctgggattacaggcatgagccactgcgcccagccctagtttttaattttttttggaaacttttttttttgagacaaggtcttgttctgtcacccaggctggagtgcagtggtgtgatcatggctcactgcagcctcaacctcctgggctcaaatgatcctcctacctcagcttcatgagtagctgtaactaccagtgtgcaccactacgtctgactaaatatatatatatatatatatatatttttttttttttgtagagatggggtctcactatgttgcccagggtggtcttgaactccttggcccaagccgcccccctcccttagcttcccaaagcactggatttataggcatgagccgctacaccatgcccaagcatatacactgttttctgaaccatttttgactaagttgcagacctggtacctttttttatttttttatttttgagatagagtctcactctgtcacccaggctggagtgtagtggcacgatctcagctcactgcaacctctgcctcgagttcaagcaattcttctgcctcagcctcccgaatagctgggattacaggcgcccaccagcatgccccgctaatttttgtatatttagtagagacagagtttcaccgtgttggccaggctggtctcgaactcctgacctcaagtgatctggccacctcagcctcccaaagtgcggagattataggcgtgagccactgtgcccagccgagaaaagcctgtttcttgactttgagccaaatagacatgacccctggagaaactgaggactggagagtcgaggcggccacccccgacctgcccccatggctctccagtgtgcaggtggcacctgctaggtggagttggaggcgttggagacagccctttggggagatgggaggtgacacccccgccccttctccgtgctccggccttctcctctgctcccatttcctctttctgggccccaaccaagccactccttccctttttgctgccgcttgctcgatcaagtcctgcctgcaccgacccctacccccgccctctgcacgccaaccctggaggcagaagcagtcccatcccctctcccatcgctggttggggcccatgctggtgcccccaggagccagacgagatgctgggcaagcctccagcccccacctcccacctggtggatcatacccattttacagatgagaaaattgagacacagagagggggaagggcagccttgggatgtcagagcttagcggggggctgagctggtgtctttgaacctctagtcccaggctcttgaagactccagcatcagtatcccggacccagggccggtttggcaggtgcgcgaactgggctgtcccagagggttccaggctcagaagagcctgaagtttcagcttgcacccagccccagaaaatctgtggctggccctgcaaggaccctgccagattttgtaccatctgtcagcaaggtcaggtcgattctgtctccccagtgtctctcaaatatgtcctctcctctccagctccatgacagccacattggtccagccccacggttgctcacctgaaccaacgcagtccccactgccctggtccgggctcccccagaccaccccccacagcctgtcctccctgcagcagccaccagagggcgcctgtgagcacctgagtcagggccagtccctcctctgcccacagccctccatggctcccaagtccctcagggtcaaagcccaagacttccctgcaacccacaaggcccagcacaacccaccctcccctccttcctctctccccctcctcactctgctccagccacaagggcctcctcactgttcctccaatatgccaggtgcggccctgccccagggcctttgcacaagctgttactgtcacctggtgtgccctctaagattttgacagccaccttccggccttcacaaatcactttcactgagaggccttccttgactgctcacaaatcacttccactgagaggccttccttgactgcgtggctatcgtagtcacctaattactccttgccctatttatcctatgttatttctttcgtaaaagtttctctacctgaaattattgtagcaaataataatacatattagtattgttatgataaataataaaaataggccaggcacggtggctcacgcctgtaatcccagcactttgggaggccgaggcagacggatcacttgagcccaggaatttgagaccagcctggctaacatggtgaaaccacagctgtactaaaaatacaaaaattaactaggcgtggtggcacgcgcctgttaccccagctacttgggaggctgagggaggagaatcacttgaacctgggagccagaggttgcagtgagctgagattgcgccattgcactccagcctgggcaacagagaatctgtctaaaaaaaaagaaaaaaagaaaaaagaaaaaaacccataagaaccataaccataaaaagtattaaaaacacaaaaactggccaggcgcggtggctcacgcttgtaatcccagcactttgggaggccgaggcgggtggatcacgaggtcaagaccacggtgaaaccccgtctctactaaaaatacaaaaaaattagccgggcgtggtggcgggtgcctgtagtcccagctactcagagaggctgaggcaggagaatggtgtgaacccgggagacggagcttgcagtgagccgaggtcgcgccactgcactccagcctgggtgacagagcaagactccatctcaaaaaaaaaaaaaaaaagaagagaaaaagaaaacaaaaacaaacaaaaactttctggccacacaaagataactggatctggccctcaagcagccggagtttgcgacccttaccgtgagcattttataatcaattcatttggccctcagtttgatgcagcaggcatggtctgttgaggtccatgttttgttttttttgtttgtttgttttgtttttttttgagacagaatctcgccctgtcgctcaggctggagtacaatggtgtgatctcagctcactgcaatctctgcctcccaggttcaagcgattctcctgcctcagcctcctgcgtagctgggattacaggcgtgagccaccacacccggctaattttgtatttttaatagagatggggtttcgccatgtttaccaggttggtctctaactcctgacctcaggtgatccgcctgcctcagcctcccaaagtgctgggactacaggcatgagccaccgtgcccagcctgaggttcatgttttacagatggggaaaccaaggcacagagcggcaaagccgctagcctagggtcactgagtgaggtcccggctgcaccggggtttgaacccaggaggcctggcgtggagttgggggtgtctgacgtggggttgggggtgtcgggggtgggagtcccgtggagggctgagcggttctgctgctccatccccaggcccaggcgagagcgggaagagcaccttcatcaagcagatgcggatcatccacggcgccggctactcggaggaggagcgcaagggcttccggcccctggtctaccagaacatcttcgtgtccatgcgggccatgatcgaggccatggagcggctgcagattccattcagcaggcccgagagcaaggtgagccgccagggcaggcaggggcccagggcaggcaggggcccagggcagggttccccagaccccggagcagggccaagttccccagacttcagggcagggcagggcagggcagggcaggcagggaagggtccccagaccctggggcaaggccatgtcctccagacatatgtgcatacatacaagtgcacacacaagtatacacgcataaatgcacacacgcacatgtatgcacacgcacagacatgcacacaaggacacacacgtacatgctcacaaagatacacacgcatgcccacatgcacacacccacacacatacacaaatgaatgcacacacgtgcacacgtgtgcacacacacaaatgcacacaaggatccatgcagatgcccccacacagatgcacacaaataagtgcacacacaaatgtacacactcaaacacgcccatgcacgtgtacacactcacaaacacacacaagaatgcatgcaaattcccacatgcacacacacacatgcacatacacaaacacacacaagcatgcatgcaaattcccacatgcacacacacacatgcacatacacaaacacacaaggatacacacatgcctgcatgcaatccccccatgcacatgcacgcacatgtgtgcacacatacaaatgcacacacaagcacacctatgcacgcacccacaaatgcagccaaggatacatgcgcgtgccccacacacaaatatgcaaacaaatcacacacccagacacacccatgtacatgtgtacatctatacacacacacacacgagcacgcttgtacatgaacaaacacagagaaatgcacacacaacactcagagtccatcacaaaggtctgagcaacgcgagtgcctggggggagctagggctgtttggggaaaagaaggggaaacccagagtctggggggcagctcagggttcacgcgcctctgggggacttctgaggggcagattgcttcagtgctctgtgtcttagtcgcttcatctgtggaaggggggactgtgagtgccgtgcttcctgggagccagctagtgtaaagagcggggctgggtgccatgctccccctgagcctgggctcgcccgagcacatgtgccctctgcagcccctcatgtggtggtctgtgcttttccctctggggatccatgcaagaacagacggaggacaaatcagaagtgtgcgggggggtcgggagctctggggaagaaggagagcagtgggaagagagcgtgtttcagggagggacgtgggggcttgcagagatgcctgcggagggcagccccactcagaaaggctaccctaactgcccccgtcctccctccccagcaccacgctagcctggtcatgagccaggacccctataaagtgaccacgtttgagaagcgctacgctgcggccatgcagtggctgtggagggatgccggcatccgggcctgctatgagcgtcggcgggaattccacctgctcgattcagccgtgtagtgagtctggggtctgcgggggatgggcgcgtggggaggggctgagggcaggggccaggctggctggcttcctgcagcaggagatattgtgggcgcagatgggctgtgaggtggtcctgctccaggatgaggtccttccagggggaccctaattcccgggggaccctgttctgggggtgacccttttcctgggggaactcccttcatggaatgaccttgttcctgggtggaccctgttccttgggactctgttctggcggtgatcttgttcttggaatgaccctattcatagggggactctgttctaggagtgactctgttcctgagggaatccagttccttggggagaccctgttctagggggtatcctgttcctagagtgaccctgtgcctggggttccctgttcctgcgaggaccctgtttcaggggtgaccctgttcctgggggaaccgtattcctagagtgaccctgttcttggggggaaccctgatcctggggggaaccctattcctggagaaccctgttcctggagtgaccctgggccttggagtccctgttcccgtgaggaccctgtttcaggggtgaccctgtttctggggggaccctgttcccgggggtgactctgttcccagggagaccctatttcctgggggatcctgttctggcgttgatccttttcctggagtgaccctgttcctaggggtgatcctgttcctggggggactgtattcctagagtgaccctgttcttggagggaccctgttcctggggggaccttgttcctgggggaaccctattcctagagaaccctgttcccggagtgaccctattcctggcgggaacctgttcctagagtgcccctgttttagaagggacccttttctgggagtgaccctgtttctgaggggaccctattctggggggaccctgttcctggagtgaccctgttcctggggggaccctgttcctaaagtgaccctgttttaggggggactctgttccaggggagaccctgttctgggggtgaccctattcctagtgggatcctgtactaggtgtgatggtggatgtccaaggtggcttgatgtctgggaagactgttcccaggctaccagcattcttggggtagcgccacccctgccatagcagctctcccgggggacaccactcctcgatgaggccattcctcatgtcacgccatccctcgggtcaccctgctctgcgtgtgaagctgcttttccttggggctccattgcctcaggtgggggacgctcctgggccatctgccaactccagggaccccacctccacccagggagctctcctcccccagcagggtccttgctgggcctttcgtagggcctgggaagcaaagggaggctggctgcaaggctgggcctcaggactccttgctctgcagctacctgtcccacctggagcgcatcaccgaggagggctacgtccccacagctcaggacgtgctccgcagccgcatgcccaccactggcatcaacgagtactgcttctccgtgcagaaaaccaacctgcggtgagcgctccacctaggcccagcctagggggcagggaaggcttcctgtaggaagggcaaaggagctggggccctgagggatgagtaggagtttcttaggcccagccttcaaggagctgccaagctaggggaagcaaagctccatgtagacacctccaggcccccaggtagtcaggactgggacctgtaggagcccaggctgaggcatcagagatccaggagggaatatcttcttggaggagggaatattaatggggttttgaaagacgaataggagttcagtagtcctaaccctgaaggggctgctggggaggaggaaatagagactatacagtcaggaccaggtctggggaggcctggtctggggagctcagaggtgatccctgtagtcatcaacactgggggatggactagagtgtgaggctggaagtcaggaaactcagaaaaaggaggagccaggacagcgggcgtggggatggaaaggaagggatgggcaagagttgtttctgatgtggaatgggcaggactggatgagtgtgggaattagaacaggaagtcaaaaatgacacctgagttttttgtcaaggtgatgggggtagacagtggagccggtgggctagaggatgaaaaggtggtgatggagtcctttgggacaggttgagtctgaggggcctagggggactccaccttagctggcagacagaggtgggaatggccagtgcagcaccctaaccctaaccctaacccagcagagcaatggccaatgtcaaaggtcaggaaaggaaaggtcaagaatacagtgagaagaatgactctgggattggcagttagagggtcactggtgaccttagcaagatctgtttccatgggctgatggcggggagctgagcaggggtgcaaagtcatgcccagagacagcgattgtgtttgacctacccctatttggccttcctttccctaaatcccccaaacctattgttttggcctcttcaatagtccttactaggaaggttcataatttatctgttttctgtgggtctcctctacaagatggagagcctcacaaggttaggggctgagtttgattcttctgcttctttagtgaatagctaaaggtcagagtagaagttggtaaatgtgggtggatggttggaaagatggaatgggggcaacccgctcgggtccccttccacgctgtggaagctttgttctttcgctcttcacaataaatcttgctgctgctcactctttgggtccacaccacctttaagagctgtaacacttactgcgaaggtctgcggcttcattcttgaagtcagcgagaccgagaacccacgagaaggaaccagctctgggacacaatagtagtgttagtacccaaggatgacttctatgggagagatacttggtctgggaatctttaaaaaaaaaaaaaaaggaaagatggaagggaatggatgggtggatgaatgggtggatggatagatgaatagatggatggataagttgagggatagatgagtggatggatggagtggcaggatggatgagtggatgaatcaatggatagatggatgagtgggtggatggatgaatggatggatagatggatggattgaaagagggatgagtggatggatggatggatggatggttagatgggtggatgggtgatacatgaatggatgagtgggtggatgagtggatagatggatagatgggtggatgaatgggtggatggatgggtgaatgagtggatggatgaattaatgggtagatgggtggaagggtgatgggtgaatggatgggtgggtggattggtgagtgaaggatggatggatgagtggatagatggatgggtgggtgggatggatgaatggatggatgaatgggtgggtgaatgcatggatggatgggtggatgagtggatggatggatgaatgaatgggtagatgggtggcaggtgatggatgaatgaatgaataaatgggtgaatgggtgagtgaaggatggatggatgagtgggtgaatggatggatgaatggatgagtggatgggggtgtgggtgggtggatgggtagatgggtggacgagtgagtggatagatgggtagatggatgtatgagtagatggataatgggtgaacagatgggtggatggatagatgagtagatgaagcgatggatggatgggtggattgagtaaatgggtggacaggcaggtggatgatggatggatgaatagatgggtagatggatagacggatagatggatggatgagtgaatgaatagatggatgggtggatggatagatggatggatgggtgggatggatggatggatggatggatgaatgggtggatggatgggtggatgagtggatggatggatgaatgaatgggtagatgggtggtgggtgatggatggatggatgaatgggtggatggatgggtggatgagtggatggatggatgaatgaatgggtagatgggtggtgggtgacggatgaatggatgaatgggtggatgggtgagtggatgaatggatgagtggatgggtgggagggtgggtggatgggtacatgggtggatgagtgagtggatagatgggtagatggatggatgggtagctgggtaatgggtggacagatgggtggatggatggatggatgagtaaatggagagatggatgggtgggtcggtgggtggatttcgtaaatgggtggacaggtggatggatgatggatggatggatagatgggtagatggatagatggatggatgagtgaatggctggatgggtggatggatgggtgggtggatggatgatggatggatggatagatgggtagatggatagatggatggatgagtgaatggctggatgggtggatggatgagtgggtgggtggatgggtggatggatgagtgaataaatcgatgaatggggtgggtgggtggataaaagtttaggagtgaaggtagaggctgggaaatcatggggaagtctgggccaaggaagtgatttttaggtgtggcccaggagtgagacgaatgaatggagtgagggctcagaggacactgagacccgagatgagaggtgatgcccacagttcccaactggtcagttgctgatcccactcccgtctcagtctccagagccccctctcgacggctgcttaccctgtctggctctggatgtggggtttgagggactctgaggatgcatgggaggagtgggtctcagggatcaggagacacatccagcagctgcagcctaactgcttcatcatcagtcccggtttcccctcctgtgcaatggggcaagtcccttcttgcttgaggccctgggccgggcccgtccaaagcctctgttctgggacttcctgagtaacggttgcatccccagggaaatgacgcacagatggttatcagcgacccacatttctcagaagagagagaacaggaaggtgggggcagggttcaggcttttgttacggtgcgtggggctgagtcacagatggaggggaggacgtgtgctctgggaacagccctcattcccatctgtgtggccactggacatgcccatggccagccagagcacaggagccccatagcacagatgggaaaactgagttttggagatgtttggcaatttcctccgccgggtcgcccagccagcaccagggcacatctcagatctgtccaacctgctcccctctaatatgggggtagaaagcaggcagcccagcacagtagaagcttgggaaagtccccgctcctccctggatctcaggcttctcatctgtaaaatgggcgtaagactcatccttgcctcgcgggaatgacatggcaaatccacgagaggctagcacctattcttgctgtcgctattatggatcttggcatatcccagacgtgatgggggttgggggtgtcacggagcaggctcctgagctctgaaagggggcacctcggttccctgtaggatcgtggacgtcgggggccagaagtcagagcgtaagaaatggatccattgtttcgagaacgtgatcgccctcatctacctggcctcactgagtgaatacgaccagtgcctggaggagaacaaccaggaggtgcgccaccgcctccctcgccctgcccacttgttggcccagggaccctcacctgagcaggaagctctggtgcagaaagggagggatccctgctcttgaacgggcctgtgtgtgcccagcatggctatgaacttgacccttcagccttttgtggtcagattgcagcaacccaagacacagacctacagcatttgtttggtcaggaccccagacacacacacacacacacacacacacacacacacacacactacagtgcacacacgcacatacacaatgcatgcacacaaacacgcacagacacgtgcataatacatgcacatacacacgtgcacacacgggacacatgtacacacgcagtgcacatgcacaacacatgcacacgaacacacatgcaccacacacatgcacacttgcatgcactcacgtgcacaatacacgcatatgtacacatgcgcacacacatgaacacacacatgcacacacacagtacacacatgcacacgcacacacaggcacacacacgcacacacaggcacacaggcacacacatgcgtgcacacacacatgcacgcacacgcacaggctggagtgcagtggcgcgatctcggctcactggaaactccgcctcccgggttcacaccattctcctgcctcagcctccggagtaggtgggattacaggcacccgccaccacgctcggctaattttttttttgtattcttagaagagagggggtttcaccatgttagccaggatggtctcaatctcctgacctcgtgatccgcccgcctcggcctcccaaagtgctgggattacaggcgtgagccactgtgcccagccaatagcctcttttaataagtacaccagtcgtctaggatcagggcccaccctactccagtacgacctcatctgggttaattcctcgtgtgatggccctgtttccaaagaaggtcacaaactgaggttctagggggttaggtcttgaacgtatgaattttggggaaatatgatgtaccccataacacaaggcatttgagaccttattgtacttttttttttgagatggagtctcgcttttgtcgcccaggttagagtgcagtggcgcgatctcagctcactgcaacctccgcctcccgggttcaagcgattttcctgcctcagcctcccgagtagctgggtttacaggcacctgccatcatgcccggctaattttttgtatttttagtagaaacggggtttcaccatgttagccaggctggtctccaactcctggcctcaggtgatctgcccgccttggcctcccaaagtgctaggattacagccgtgagctgccgcgcccggccaggtctccctcttcttatgaggacagcagtcacggacttgagggccaccgtattctagtattgcctcaccttaacgacctcttcaaagaccctatctccaggccaggtgcagtggttcatgcctataaccccagcacgctgggaggccaggagttcaagaatctctctccagataaggtcacactctgaagctctggggggacatgaatttcgggaggacacacttccaaccagcacaggcacaaaaccatgtcaggcacacccaggcagctgtccatatggaaacacgggcacacccgcctcagccccagccaggcagataggggtgagcccatgcccctggagccaacagccccgtctccgcgatgggagggtttcctgtcccacctggctggttgaagcactaacctgcttctgcccccaacacagaaccgcatgaaggagagcctcgcattgtttgggactatcctggaactaccctggttcaaaagcacatccgtcatcctctttctcaacaaaaccgacatcctggaggagaaaatccccacctcccacctggctacctatttccccagtttccagggtaagtaattctagaactttctatacccttcaactcccaaaagcagctccgaagagagatgctaatccagactctacttcagcctggagtcaccggaactttcacataggatcagacccgcgttctagactcagctccatccactgcccgacctcattgaatctgttttcccttctgtggaatggaataaaatagcagaggcccttggaactgagtaaagtgaggaattctaaaaacacgtagcatatcacgtacaccttaaacattttatttatttatttatttttgagacagagtcttgctctgtcaccaggctggagtgcagtggcgtgatctcggctcactgcaacctttccctccagagttcaagcgattctcctacctcagcctccctagtagctggaactacaggtgcgcgccaccacgcccagctaatttttgtgtttttagtacgaaaagacgggatttcaccatgttgaccaggatagtctcgatcacttgacctcctgatccacccgcctcagcctcccaaagtgctaggattatagacaggagccaccatgcccggccaaacattttattttatgcttgttggccaacatttggggtttgagccaagatccttcaagcatgggtttgctatgtagaggtcactgttgtaaagcacttctggaaagattgtctactatttccagaatctgcctaggttttaagaatgattctttttcttttctttctttcttctattttttctttttgagacagagtctcactctgtcacccaggctggagtacagtggtgcgatcttggctcatggcaacctccaactccccggttcaagtgattctcctgccttagcctcccaagtagctgtgattacaggcacgtgccaccaagcctggctaatttttagtagtttcctgtcctatttttagtagagatggggtttcaccatgttggtcaggctggtctcgaactgacctcaagtgatccacctacctcagcctcccaaagtgctgggattacgggcgtgagccaccgcatctggccataacgtttctttttctaatctttcatagtgatctcatctatccctaattggatagcaatttctttttctttaatccattttttctttaatttttttttgtttgttttttgagacggagtctcgctctgctgcccaggctggagtgcagtggcgcaatctcagctcactgcaagctctgcctcctgggttcacaccattctgctgcctcagcctcccgagtagctgggattacaggtgcccgccagaacgtctggctagttttttgtatttttggtcgagatggggtttcatcatgttacccaggttggtctcaatctcctgacctcatgatccacctgtctcggcctcccaaagtgctgggattacaggcgtgagccatcgtgcccagtctattttttctttaatttcttttctttttttttttttttttgagatggagttttgctctttttgcccaggctggagtgcaatggcacaatctcggctcaccgcaacctccgcctcccgggttcaagggattctcctgcctcagcctcccgagtagctgggattgcaggcatgagccaccaccccggctaattttgtgtttttagtagagacggggtttctccatgttggtcaggctggacttgaactcccgacctcaggtgatccacccgcctcggcctcaaagtgctgggattacaggcgtgagccaccacacctggcctttctctttaatttttaaagcagagctttgaacaatgtttccaaagcacacagcttagttttgtaatacaatgaccttctttcatgcggcacttgtagctacagatttgcataacgtttcttttaattacatatgaatcaagacacgtacaatgggcaaaaacaggtttgggaacaaactctcagtccatccagagggtgaaagggccacagggcaactacagagaaacaccatctagtgttgggcaccacttagtatattttacaaaggggaggcagagttgtggttaatccagggaccaacgtggggaaggtacatattcactagcactttccccagaacaccactgtgaggataaagtgtggtggcgggtgtcctgcttagctactgccgagtaacaaaccatccccaaacttagtgacttaaactggtcattttcctttgcttatgattttgtgggtcaggaatttgggaaaggttgagctgggtaagttcatctctgatccatgtgacatcagctgggctctatgggattggagataaacttccaagatggcttcttcccccatatgtctggtgccttggtgctcttggcactcttggcctctctctctgtgtctctccctgcctccctctcccatctcatctctctctcctcccctttctcctagtctgtctctccttttccacctcccctgttctctctgtctccatctggggcctcatgatccacagcctcttcacatggtttgagcttactcacaatatggctgcctcagggtagacagacttcagcccaggtggaagctgcttctcatgatagcctcagaaatgtcagacgttactctgccacattctatttgtcaagcacatcactcatatcagcccggattcaaaagaaagagactccatctcttgaaggcagcatgacacatgcatacagggagggaaggaagtgacggcagccatcttggagataacttgccttcatgtcctggggatgccgtaacaaagtaccacaaactgggtggcttaaaacaacaggaaacaacagaagtccaaagttaaggtattggcaaggttggttccttttggaggctctaagggaaaatccattccatgcttctctctcagcttctggtggtggcctacaatccttagcttgtagacatatcactgcaatctctgcctccatgttcacatggctgtcttctcaccatgcctttatgtgtcctctcctgttgttataaggccaccagtcattggatttagggcccatactttggtatgaccactttttttttttttttttttttttgagacaaggtcttgctctgttgcccaggctagagtccagtggtgtgatcacagttcactgcagcctcaacctcctgggcacaggtgatcctcccacctcagcctcttgagttgctgggactacaggcgcacaccaccacacctgggtaatttttgtatatttctgtagagacagggtttcgccatgttgcccaggctgatctggaactcctgggcccaaccacacatctgtcatccacctgccttggccttccaaagtgctaggattacaggcgtgagccctcatgcctggccatgacctaatttaacttaactaattacatctgcaaatatccgatttctaaaagtcatattctgaagttccaggtggacatgaattttgggggacactgttcacctcaatatacaagcaaccatagtagatgagtccttagtacatgcttgacaccaggtccacaatcagtaaacataaactttggtgaagtcaccaggttttgatccctggtcttgtcatgtctcagagcccatgaggccaattttagccaattatacccacaagattcagggtctgggagatagacgtcaagttgttccaggatggtggcctggatagcccctcttccttgccaagcagccctgggaatcagctcatagtttagagaatttgggaacaggataaggtagatatttttttcattcaggtcaaagggaaccacccatgactcatccttgtctcccagcacaagtgactggtgcactctttgctgactcccagccctaccctccactgtgctaaataatatttgtgataataataagaaaccacactttgggaggctgaggcgcgcagatcgctttaggtcaggagtttgagaccagcctggccaacatggcaaagccccatctctgttaaaaatacaaaaattagctgggtgtggtggcgggggcctgtcatcccagttactcgggaggctgaggcaggagaatcgcttgaacccaggaggtggaggttgcagtgagctgagatcatgccacttcactccaacctgggtgacagagtgagactctgtctcaaaataataataataataataatgataataataataaaattgataacagcagctaacacatctaccgcactggtggaagcactctacaaagcttctttaatcttcatgttaaaaccctatgcagggctgggcacagtggctcacgcctgtaatcccagcgctttgggggggtcaaggcgggctgatcatttgaggtcaggagttcgagaccagcctggccaacatggcaaaaccccatctctactaaaaatacaaaaattacctgggcatggtggcaggcgcctgtaatcccagctactgccaagattgcaccattgcactccagcctgggcgacagagcgaggccccatctcaagaaaaaaaaaaagaggactctcttcccctcgtttggccttgatgccgccatcttcacagtcctgggatatttgtctatgcgattccagtcttccaactgcactggctgtaagcgaggccaagagagtgtctctctttaacacagttctgcccgaagtcccagagctgggtctcattggtccatttcaggtcacatgactcgtgtgagacaatctcctgtgttcccattggctgggccggagtcgtgtgaccagctatgactacaaaagatggagtcaacgcacagaaaaatgacaggcgcgatccctgggtcccttcagtgctggttacagggaagagggtctccagaggccccctgggtccaaagagggagggtcctcacccccttcccacactgtttccccaggccctaagcaggatgctgaggcagccaagaggttcatcctggacatgtacacgaggatgtacaccgggtgcgtggacggccccgagggcagcaagaagggcgcacgatcccgacgcctcttcagccactacacatgtgccacagacacacagaacatccgcaaggtcttcaaggacgtgcgggactcggtgctcgcccgctacctggacgagatcaacctgctgtgacccaggccccacctggggcaggcggcaccggcgggcgggtgggaggtgggagtggctgcagggacccctagtgtccctggtctatctctccagcctcggcccacacgcaagggagtcgggggacggacggcccgctgctggccgctctcttctctgcctctcaccaggacagccgccccccagggtactcctgcccttgcttgactcagtttccctcctttgaaagggaaggagcaaaacggccatttgggatgccagggtggatgaaaaggtgaagaaatcaggggattgaggacttgggtgggtgggcatctctcaggagccccatctccgggcgtgtcacctcctgggcagggttctgggaccctctgtgggtgacgcacaccctgggatggggctagtagagccttcaggcgccttcgggcgtggactctggcgcactctagtggacaggagaaggaacgccttccaggaacctgtggactaggggtgcagggacttccctttgcaaggggtaacagaccgctggaaaacactgtcactttcagagctcggtggctcacagcgtgtcctgccccggtttgcggacgagagaaatcgcggcccacaagcatccccccatcccttgcaggctgggggctgggcatgctgcatcttaaccttttgtatttattccctcaccttctgcagggctccgtgcgggctgaaattaaagatttcttagaggctgcgtcgccagcgtcctgtttatcccctctgcattcctttctcggcttacgtgtcccgggggcagtgcttacagtgcggggagcaacgtggagtaggaaggaaaaaagttatacttcttgtctacccacctgtcctggccatggtacccagaactgtggaggctgtgagtcccgcaagccgggacgtggagtccaacctccctcccaggctgggggggacattgaagcagactcctccgtggctactgacctgaaattccagtagcagcccccacccagctttgagaaggcctcttactatcctcagggcagtgttctggggtgcaagccgtagcaccccactttacaggtgaggaaaccggggcgcagagaagtggagtaatttgactaagctcacacacctggaattgacagaggcaggagcctgttcctacgttgaacacatttgtggttttttatttgtttgttttttgagacaatctcacttggttgcccaggctggagtgcagtggtgcgatctcggttcactgcagcctctgcctcctgggttcaagtgattctcatgcctcagcctctgcagtagctgagattacaggcacccgccaccacacctggctactttttttttttttgatggagtcccgctctgtggcccaggctggagtgcagtggcgcaatctcgtctcactgcaacctccacctcccaggttcaagtgattctcctgcctcagcctcctgagtagcttggactacagttgtgtgccatcacacctggccatatttttgtatttttagtagagacagggtttcaccatgttggccaaactggtctcaaactcctgacctcaagtgatccgcctccctcgacctcccaaagtgctgggattacaggcatgagccaccacacctggcctaatttttcttcttataaaaacactagtcacactggatcagggtccagcctgtcatccccatcttaacttgattacatcggcaaagaccgtatttctaaataaggtcccattcacagataccgggggttatgacttcatcatatctttgtaggggagccacatttgaacctataaaaggtattttgtaatacaaaaaggagccgggcgtggtggtgcatgcttgcaatcccagctaattgggaggctgaagcatgagagttgcttgaacccgggaggcggaggttgcggtgagccaagatcctgccactgcactctagcctgagcgacagagtgagaccttgtctcaaataataaataaataaatacataaataaataaataaatataaaagtatgttatagaaaccctctccactgagtttggtctgacattttgctgctggtcagactggggtgatgggtttcagggaggaagacctcagtggtgacagcccttctcaccacatcctatctttctgttttttttttgagacggagtctcactctgtcacccaggctggaagtgcagtggtgtgatctcggctcactgcaagctccgcctcccaggttcacaccattctcctgcctcagcctcccgagtagctgggattacaggcgcccgccaccacgcctggctaattttttgtatttttagtagagacgggctttcaccgtgttagccaggatggtctcaatctcctgaccttgtgatccgcccgcctcggcctcccgaagtgctgggattacaggtgtgagccaccgcgctctgcctcttgttgttgttttgtaagaattttagactcacagaaaagttgcagaagttgtacacagttcccaaatgccctccacccagcttcctcttacctcttacgtaaccctagtacaacccaggaaattcacatcagcgagcgtcctatgaacgaacctgtgtgtagaccttactagaatgtggcgggttctcgctcccgtcctcctttcctggaccaggatccaatcccggatcccacatcgccatgagctgcctccctctcctcattctggggcagtgcctcagtttcctttgtgacacgtcggaggagttttgcttggttgtttcttgagccgttcctcaggttgggttggtgtgaggtttgctggtgacagaaagggatgtcagagccactcagggcatcacctgactgggttcatcatgacaaagtggctcatccctggcgatcatacgttgcggatgtcttttcaccattggttggtcggagtcaggacccaaacaaagcccgtgcgtggcgcttgggtgctgtgtctcttaagtctctttcctctttttttttttttgagacggagtcttgctctgtcacccaggctggagtgcagtgatgcgatctcggctcactacaagctctgcctcccgggttcatgccattctcctgcctcagcctcctgagtagctgggactacaagtacccgccaccacgcccgggtaattttttgtattttttagtagagacggggtttcactgtattagccaggatggtcgcgatctcctgaactcgtgatccaaccgccttggcctcccagagtgctggaattacaggcgtcagccaccgcgcccagcctcctcttttttttttttttttttgagacagagttttactcttgtcacccaggctggagtgcagtggtgtgatctcagctcactgcaacctgcacctcctgggttcaagcgattctcttgcctcagcctcctgagtagctgagattacaggcatgcgctaccacacctaggtaatttttatatttttagtagagacggagttttgccatgttggccaggctggtatcgaactcctgacctcaggtgatcctcccgcctcgacctcccaaagtgctgggattacaggcgtgagccactgtgcccagccatgacccagtgggtcttaagagttttttgactgggcacagcgagatgcttttaactcatcctttactttgtcagcttcagatctgcactggatcgtttctccaaggagccctctttcctttgaatgggagatgatatttagagaccacaatctgagcaccaagtgaggaaacacatcttgtctttttttttattattatactttaagttctagggtacatgtgcacaactgtgctggtttattacataggtatacatgtgctgtgttggtttactgcacccattaactcgtcatttacattaggtatttctcctaatgctatccctcccccctcccctcaccccacgacaggccccggtgtgtgatgttccccaccctgtgtccacgtgttctcattgttcagttcccacctatgagtgagaacatgcggtgtttggtttgctgtccttgtgatggtttgctcagaatgatggtttccagcttcatccatgtcactacaaaggacatgaactcatccttttttatggctgcatagtattctgtggtgtatatgtgccatattttctttttctttttttttgagacggagtctcactctgtcacccaggctggagtgcagtggtgcaatctgggctcactgcaagctccgcctcccggattcatgccattctcctgcctcagcctcctgagtagctgggattacaggcgcccaccagcaagcccggctaattttttgtatttttagtagagacggggtttcaccgtgtcagccaggatggtctcgatctcctgaccttgtgatctgcccgcctcagcctcccaaagtgctgggattacaggcgtgagccatcacgcccggcctgtgccacattttcttaatccagtctatcattgatggacatttgggttggttccaagtctttgcggaaacacatcttttgttcgcttatttttagtgcaaaaatatttgaaacctacagaagttacaaaaccattacaatgtattcccctgtatttttcatccaggtcaggagccggcaaactgctacccacaggccaaatactacttcaattgcttttgtaaagttttattgaaacacggtcatgtccattcatgtacctgtgtctacgcaggctgttcctgcatccatggaattgagtaactgccactgatactgtctggccccaaaagccaaaaatatttactatttggcctttttgttttgttttgtttgttttttactccccttaaagacaaggtcttgctccgtcacccaggctggtgtgcagtggtgcaacctcagctcactgctgcctccaactcctgggctgaagggttcctcctgcctcagcctccccggggattccaggcataagcccctgtgtccggccaggtgtgagttttcgagtggacatgcttgcattcctcttgagtgtgaccctagcgacagaattgctgggtcatgtgctgaggtcatccatccatttctaacccagggttggccggcagcagcccctccgagctggctcctgtgttctttgccaggtcctcctccctctgtgatcacgccctccctctctggcacactgagatgttccaggctcatctcctgccctactcttggaatcaacccttcctcccaggttccctggatcctttcagcaaggggctgtagggggagggaggtgatctttagaagccacgatctgggcactaggtgctccttgctctgggattgtctcagtggaaagttaggacagggtttttttatgttttttgcataaatcatgagatcctgaattcacactgatatttgcaatcctttctttttttttttttttgagacagagtcttgctctgtcactgaggctagagtgcagcagcacgatctcgactcactgcaacctccacctcctcggttcaagcgattctcctgcctcagcctcccaagtagctgggattacaggtagtcaccaccgtgcctggctaatttttgtatttatttatttatttattattttttttttctgagacagagtctcgctctgtcacccaggctggagtgcagtgccacaatctcggctcactgcaacctccacctcccgggttcaagcaattctcctgcctcagcctcctgagtatctgggattacagcagtgcaccaccacgcccagctaattttttgtatttttagtagagacggagtttcactgtagtggccaggatggtcttgatctccggacctcgtgatctgcccacctcggcctcccaaagtgctgggattacaggcatgagccaccgtccccggtctaatttttgtatttttagtagagaaagggtttcaccatcctggccaggctagtcttgaaatcctgacctcgtgatccacccgccttggcctcccaaagtgctggggttacaggcgtcagccaccgtgcccggtccaatttttgtatttttagtagagacagggtttcaccatcttggccaggctagtctcgaaatcctgacctcatgatccacccgccttggcctcccaaagtgctggggttacaggcatgagccaccatgccaggcctttttttttttttttttaagagacgggatctctctccatcacccaggctggagtgcagaggagcaatgatggcttaccacggcctcaacctttcaggctcaagcaatcctcccatgtcagcctcctaagtagctaggaccacaggtgcatgccatcacacccatgttatttcatttttattttttgtagaaatggggtcttgccgtgttgcacaggctgggaaacttgaagtcctatttaaccctgcaagggttctttcttgctttctcccaggtcatatttacatctttctctcccagcaaagaccctagttcctaataatatctttgtatttgctactttgctcagtcctgtaaaacacatgatagtttcaaaattgctccacccatacgttccccaatgacaaatccgctaaataaaggtcaaagtttctttgcaattatttttgtctctcttcttcttcttttttttttttttttttttttttttgagacagagcctcactctgtcacccagactggagtgcaatggcacaatctcggcttacggcaacctccgcgtcccagggtcaagcaattctctgcctcagcctcctaagtagctgggattacaggcacccaccaccacgcctggctaacttttttctttttttttttttttgagacagagtctcccactgtcacccagactggagtacagtggcgcaatctcggctcactgcaacctctgcctcccgggttcaagcgattctcctgcctcagcctcccgagtagctgggattacagatgcccgccaccacgcccggctaatttttgtatttttagtagagatggggtttcgccatgttggccaggctggtgctgaactcctgacctcgtgatccacccgccttggcctcccacagtgctgggatcacaggcgtgagccaccgtgcccagcctctttttgtctttagagtgagtactgtgtatacaagttccgcgggctgattcttttctatctctatgtggttacgtttttcatttgaaatacagtttggttcatttgttttctactgttattccatcttaaagcttttccctccatccttgttgatcaattttatctttcaatatagaaagcacgaatagggcttaaaactacacaaaaggccaggcatggtggctcacgtctgtaatcccagcactttgggaggctgtagcgggcagattgcttgagcccagcggttcaagactagcctgggcaatatagcaagacctcatctatacaacaaaacaaaacaaaacaaaacaaaacgcctgtaatcccagtactttgggaggccaaggcaggtggattgcctgaggtcaggagttcaagaccagcctgactaacatggtgaaaccccatctctaccaaaaatgcaaaaaaaaaaaaagctgcatgtggtgccaggtgcctgtaatcccagctactcaggaggctgaggcaggggagtcgcttgaactcaggaggcagaggttgcagtgagctgagtttgtgctactgcactccagcctgggcgacagagcaagactccgtctcaaaaaaaaaaaaaaaaattagctgggcgaggtggagtgcacctgtagtcccagctactagagaggctgaggtgggaggatcgcttgaacccaggaggcggaggttgcagtgagctgagatcgtgccactgcactccagcctgggcaacagagcgagactccatctctaaataaataaataaataaataaataaaataaaaattgtaaaatcccaacatgtcccggcaagcgctgcgttccattcatggagctcgttcttgttcttttgcacagctgcagagccctcctttctggactgtggcatagttcattcattcacctctgtcctgtgtgtgcacattcgggttgaaaccagcgttgtgcattcacaaacagcagtttaggcgatgaccttttgcacatatactcggtctcgttagagccctgtcttcagggtgaatttctagaagaggggcctgcccttctgcagtgtggggataatggttagattaagttttgttttgttttgaaatggagtttcactcttgtctcccaggctggagtgctgtggctcgatcagctcactgcaacctctgcctcctgggttccagcgattctcctgcctcagcctttcgaatagcacccgccaccacacccggctaacttttgtatttttagtagagacagggtttcctcatgttggccaggatgttctccagctcctgacctcaaattacctgcccgtctcagcctcccaaagtgctgggattacaggtgtgaaccactgtgcccggtccagtccaggagcaagttctaaccaggatcaagggtcaaggtctgggtttgtccattatcataggctaagtcagggtcagggttcagccagggatcagggctcagttcaggattggggctcagccagggtcagggctcatcttggagtcagagctgagcctggggtcaggcatcagtctaggttggaggttgggattgggacctgggggtcttggtccaggattggaggctgtgtctgggattagggttcagtctaggatgtggaccaagcctgggatcagcattcagtccagggtagggggctgagcctgggattagggcttagtcttggatgtggactgagcctgggatgagagctcagtccagggattagggctcagtctaggatggggactgggcttgggatgcaggctcagtacagagtggggggctggtcctgggatcaaggctcagtctaggacgggggctgggcctgggactcagcaatcaggactcagtctaggatgagggactaagccttggatcagtgttcagtgcagagtggggggctgggcctaggagcagggctcagtcaagcatagggggcttagcctgggatcagggcttagtccatcatgaggcactcaacctcagaacacacaatgtctctctgtgtaggtgcctgagtcatgtgaggctggactgaggctcacttgtctactcactgggcagggcagtgcctgggcaagacctggctgtttgtttccctcctggcctcacctcccagctgccggcccctcctccccgagccccacatccctctccagatcccctttctgcttggtgacctccagtgacaaaaggcagctgcctccccagtcagttcctcgcatggagcctcccgacactgtcctgcttcagaactgaaccgtaagcaaagggaggggccatggggccccagcatgtgctgcgatcagcccccgtctcctgccagccctgccctccctggggtgcccccgcttctcagggccgatactgtgccgctcatgggacgcctgtgttctcatgggacgtctgtgccctcatgggacacctgtgcccctcatgggaggcctgtgttctcatgggacgcctgtacccctcatgggacgcctgtacccctcatgggacgtctgtgttctcatgggatgcctgtgccctcatgggatggctgtgttctcatgggacgcctgtaccctcatgggacgcctgtgcccctcatgggacgcctgtgttctcatgggatgcctgtaccctcatgggacgcctgtgcccctcatgggacacctgtgttctcatgggacacctgtgcccctcatgggatgcctgtaccctcatgggatgcctgtgccccgcatgggatgcctgcattctcatgggacacctgtgccctcatgggacacctgtgttctcatgggacacctgtgttctcatgggacacctgtgccctcatgggacgcctgtgccctcatgggacaactgtgttctcatgggacgcctgtgttctcatgggacgcctgtgccctcatgggatgcctgtgttctcatgggacgcctgtgcccctcatgggatgcctgtgccctcatgggacgcctgtgttctcatgggatgcctgtgcccctcatgggatgcctgtgttctcatgggacgcctgtgcccctcatgggatgcctgtgttctcatgggatgcctgtgcccctcatgggatgcctgtgccctcatgggacacctgtgttctcatgggacacctgtgccctcatgggacgcctgtgttctcatgggacgcctgtgccctcatgggatgcctgtgccctcatgggacgcctgtgacctcatgggatgcctgtgttctcatgggacgcctgtgttctcatgggacgcctgtgccctcatgggacgcctgtgttctcatgggacgcctgtgccctcatgggatgcctgtgccctcatgggatgcctgtgccctcatgggacgcctgtgttctcatgggacgcctgtgcccctcatgggacgcctgtgccctcatgggacgcctgtgccctcatgggacgcctgtgttctcatgggacgcctgtgcccctcatgggacgcctgtgccctcatgggacgcctgtgccctcatgggacgcctgtgttctcatgggacgcctgtgcccctcatgggacgcctgtgttctcatgggactcctgtgccctcatgggacgcctgtgttctcatgggacgcctgtgcccctcatgggacgcctgtgttctcatgggacgcctgtgccctcatgggacgcctgtgttctcatgggacgcctgtgcccctcatgggacacctgtgttctcatgggacgcctgtgccctcatgggacgcctgtgttctcatgggacgcctgtgcctctcatgggacacctgtgttctcatgggacgcctgtgccctcatgggacgcctgtgccctcatgggacacctgtgttctcatgggacgcctgcattctcatgggacgcctgtgccctcatgggacacctgtgttctcatgggacacctgtgttctcatgggatgcctgtgccctcatgggatgcctgtacccctcatgggacgcctgtgttctcatgggatgcctgtaccctcatgggacgcctgtacccctcatgggacatctgtgccctcatgggatgcctgtgcccctcatgggatgcctgtgccctcatgggacgcctgtgttctcatgggatgcctgtaccctcatgggacgcctgtgcccctcatgggatgcctgtgttctcatgggatgcccgtgccccgcatgggacgcctgaattctcatgggacacctgtgccctcatgggacacctgtgttctcatgggacgcctgtgttctcatgggacacctgtgccctcatgggacgcctgtgttctcatgggacgcctgtgccctcatgggacgcctgtgttctcatgggacgcctgtgccctcatgggacgcctgtgccctcatgggacgcctgtgttctcatgggacgcctgtgcccctcatgggacgcctgtgccctcatgggacgcctgtgttctcatgggacgcctgtgcccctcatgggacgcctgtgttctcatgggacgcctgtgccctcatgggacgcctgtgccctcatgggacgcctgtgccctcatgggacgcctgtgttctcatgggacgcctgtgccctcatgggacgcctgtgccctcatgggacgcctgtgttctcatgggacgcctgtgccctcatgggacgcctgtgccctcatgggacgcctgtgttctcatgggacgcctgtgttctcatgggacgcctgtgcccctcatgggacgcctgtgttctcatgggacgcctgtgccctcatgggacgcctgtgttctcatgggacgcctgtgcccctcatgggacgcctgtgttctcatgggacgcctgtgcccctcatgggacacctgtgccctcatgggacgcctgtgccctcatgggacgcctgtgttctcatgggacgcctgtgcccctcatgggacgcctgtgccctcatgggacgcctgtgttctcatgggacgcctgtgcccctcatgggacacctgtgttctcatgggacgcctgtgccctcatgggacgcctgtgttctcatgggacgcctgtgcccctcatgggacacctgtgttctcatgggacgcctgtgccctcatgggacgcctgtgttctcatgggacgcctgtgcccctcatgggacacctgtgttctcacgggacgcctgtgccctcatgggacgcctgtgttctcatgggacgcctgtgcccctcatgggacgcctgtgttctcatgggacgcctgtgcccctcatgggacacctgtgccctcatgggacgcctgtgccctcatgggacgcctgcgttctcatgggacgcctgcattctcatgggacgcctgtgccctcatgggacacctgtgttctcatgggacacctgtgttctcatgggatgcctgtgccctcatgggatgcctgtacccctcatgggacgcctgtgttctcatgggatgcctgtaccctcatgggacgcctgtacccctcatgggacatctgtgctctcatgggatgcctgtgcccctcatgggatgcctgtgccctcatgggacgcctgcattctcatgggacacctgtgccctcatgggatgcctgtaccctcatgggacgcctgtgcccctcatgggatgcctgtgttctcatgggatgcctgtgcccctcatgggacgcctgcattctcatgggacacctgtgccctcatgggatgcctgtacccttcatgggacgcctgtgtgtggttgccatgattactacctgagactgtcactacgacagttactattgttactacttgagaccatcattacaagactgaacgaagggacgaatgtagaaatgaaaacttaagacagaagaaactgttttaaaggaagggaccaggggaagaaaaagagagctccctgcttctagtgagcaaaggcagccccccaagcttctacagcccttcgtacttattgggtagaaagcagggggaggaaacgattggccagctgcttgattgttcacacgttcacgttattgctaacaggtttcagatttgcctacttgcaagaaacacttgtgcctggggcgtgactgccctcagcattccttctgggcggcagacgcagtttgtcagtttgccaacagcctgctttcatgagaacagtttgctgtttactcacgtagcctccagtggtatactgagttgatcacaaccctcattctttcggccttcaacacctgagccctcacgggacatctgtgcccctcatgggacacctgtgtcctcgcagtacacttgtgacccttccaggacaccttactggtagaattagtgtagctgcccccaccctgaggccaaggacaccattgtctcaggaaggctgaagaccacaggctcctggggggacagagggcaggtggggcccctcaggaccctccttggtggtaagtgggcctggcctgggggtgattgcaggcgggaggaggctcccagcagggacttatcctgggtcctactcacacttctggggcctgcattatttcccaaatcaccccacaccccaaggccttctggatggggacgagtggggggtcacagacactgggggagctggagagcagagacctcacactccatccgtgacagatgatgtccaagcccctacatgccccagaccccagggcaaggctgagcctccctcctcagaccccagggcaaggctgagcatccccactcagacctcagggtagggcctcgcctcctcccttggaccccaggacagggcctcacctctcccctcagaccccaaggcagggcctcgcctcccccctcagactcaggacagggccatgcctccccactcagaccccaaggcaaggccaaccctcacccctagaccccaggcaggttcaagcctccccgctcaaacctcagggcagggcatacctccctcctcagacccagggcagggtgtgtctcccctctcagaccacagcacagggcctcgcatccctcctcagaccccaggacaaggctgagcctctccgctcagaccccagggtaaggtcatgcctcccctctcagaacctagggcaaggccaaccctcccccctcagaccccaggcaggtccaagcttccccctcagacgccagggcagagcctgcctccctcctcagacgccagagcagggtgtgtctcccacttagacccacagccacctcacctcaggctgagtcaccgtgagccgttgtcagcagggccatggggatggggtgagcaagtccctacttttcctatgcacctcaatcccagtggggggctgccccagggggccagcagctctgctcccagcagggtgagctcaggggcaggagaggcaaccatgaatcccaaaatgggcgcctggccccgagaccctaccagcttgtccctgggggtctctctccctggacctgtgtgtcctcccatgggcagaaagttggcctcaggccgcctttgtgggcctcagttttcccttctgtaacgcatcaggctctctgggcctcagtttccccttctgcaacgcatcgggctctctgggcctcagtttccccttctgcaacgcatcgggctctctgggcctcagtttccccttctgcaacgcatcgggctctctgggcctcagtttccccttctgcaacgcctcgggctctctgggcctcagtttccccttctgcaacgcatcgggctctctgggcctcagtttccccttctgcaacgcctcgggctctctgggcctcagtttccccttctgcaacgcctcgggctctctgggcctcagtttccccttctgcaacgcatcgggctctctgggcctcagtttccccttctgcaacgcatcgggctctctgggcctcagtttccccttctgcaacgcatcgggctctctgggcctcagtttccccttctgcaacgcctcgggctctctgggcctcagtttccccttctgcaacgcctcgggctctctgggcctcagtttccccttctgcaacgcatcgggctctctgggcctcagtttccccttctgcaacgcatcgggctctctgggcctcagtttccccttctgcaacgcaccgggctctctgggcctcagtttcctcttctgtaacgcatcaggccctgtttcggggatcaagtcggatgagtcagtgctcaagggcatgcaggcacttgacatttattaggcacctgctgtgtgctgagcgccggtggagcatgtggggagacctcagtggagccgacgggtgcttcgggggtgatcagggctggtggggaggagtcgtccggctggaaaggggtggcccatcccgagtggggactcatttcccctccgtgactgacggctccggggctccctgcgggtctccggctttcgaggacaggaagaaggcagccagggcaggggtgggggtcctcacagccagggcagccccagcgcgttggctccaggagcccgggtgggggccgaccgttggggtgcccctccctgtcctcggccttacctccaccctggagggcaccttgaacataacaggaaatttcaaataacaggaaaccaagaccagcaaggcgggtggctccaccctgcgtcgggcctcagtcagcccccgggggaggccatgaacgccacggggaccccggtggcccccgagtcctgccaacagctggcggccggcgggcacagccggctcattgttctgcactacaaccactcgggccggctggccgggcgcggggggccggaggatggcggcctgggggccctgcgggggctgtcggtggccgccagctgcctggtggtgctggagaacttgctggtgctggcggccatcaccagccacatgcggtcgcgacgctgggtctactattgcctggtgaacatcacgctgagtgacctgctcacgggcgcggcctacctggccaacgtgctgctgtcgggggcccgcaccttccgtctggcgcccgcccagtggttcctacgggagggcctgctcttcaccgccctggccgcctccaccttcagcctgctcttcactgcaggggagcgctttgccaccatggtgcggccggtggccgagagcggggccaccaagaccagccgcgtctacggcttcatcggcctctgctggctgctggccgcgctgctggggatgctgcctttgctgggctggaactgcctgtgcgcctttgaccgctgctccagccttctgcccctctactccaagcgctacatcctcttctgcctggtgatcttcgccggcgtcctggccaccatcatgggcctctatggggccatcttccgcctggtgcaggccagcgggcagaaggccccacgcccagcggcccgccgcaaggcccgccgcctgctgaagacggtgctgatgatcctgctggccttcctggtgtgctggggcccactcttcgggctgctgctggccgacgtctttggctccaacctctgggcccaggagtacctgcggggcatggactggatcctggccctggccgtcctcaactcggcggtcaaccccatcatctactccttccgcagcagggaggtgtgcagagccgtgctcagcttcctctgctgcgggtgtctccggctgggcatgcgagggcccggggactgcctggcccgggccgtcgaggctcactccggagcttccaccaccgacagctctctgaggccaagggacagctttcgcggctcccgctcgctcagctttcggatgcgggagcccctgtccagcatctccagcgtgcggagcatctgaagttgcagtcttgcgtgtggatggtgcagccaccgggtgcgtgccaggcaggccctcctggggtacaggaagctgtgtgcacgcagcctcgcctgtatggggagcagggaacgggacaggcccccatggtcttcccggtggcctctcggggcttctgacgccaaatgggcttcccatggtcaccctggacaaggaggcaaccaccccacctccccgtaggagcagagagcaccctggtgtgggggcgagtgggttccccacaaccccgcttctgtgtgattctggggaagtcccggcccctctctgggcctcagtagggctcccaggctgcaaggggtggactgtgggatgcatgccctggcaacattgaagttcgatcatggtacgtgatgttgcggcctcttattccctggtgcgtgcatgcgtgggggccgtggctcaggggggctgtggatctaggggcagccgggtgtgtctttgctagagagggccacgggccagtgccctgtgagggtggagtgtgtgtgtgtgtgtgtgtgtgtgtgtgtgtgtgtggacaacctctgggcgttgcgggaagtgggggtgacaatgacagttaatgccgcctcttcttgttcacttcccctttagaaatggcagggcccatgccccatctctggcctctgcatcttttggggacccactctctggggctggcagaggcaccaccttggcttcctgggctgggggaatcttccctcacatccccttcagcatgaacggcctcggctttcccggtgggtaaaacagtttaatcactgaagccgaagcacagggttgattgtacacgctccccgccagccacaggggctgacaactgcctgccccgtgaaactccagtggagacgtttcagctccacaccattcagtatgggagacgccagccccacggggctacggtgcaagcagataactgaatttcgaagtgtaggttgtgtttaatttgaatctgtttatatttcggtagccccatggggcgggtggccacagtttcagtgcagatgtaaatccggaagcctccagcacctgcagctcatagacagctctcgcccaccttctcccaggaccaagccagtcccgtccagtccagtgtctgagcagagtcagaatccacaccacccgccgcctgggctcagaaagttctgctttaagtcattatttctccactgtacgatggggaatgcggtgtgtgggggccatttacccaccaacacagcagctgtgaggcacacacggctattgaaaattcatggaaattgctgggtgtggtggctcatgcctgtaatcccagcactttgggaggccgaggcaggaggattgcttgagtgcaggagttccagaccagcctgggcaacatagcgaaaccacatctctacaaaaaaatcctccaaaattaaaaaaattagcccgagcatgttgttgcatgcctgtggttccagctactcgagaggctgaggtgggaggatcacttgagcccgggaggtcgaggctgcagggagcggtgatcgtgccagcctgggtgacagagtgagaccctgtctctaaaaaaaaattaaaaaaaaaaaaaaaagaaaattcattgaaattaaatgaaagttaggccaggtgcattggttcatgcctgtaatcgcagcactttggggggccgaggtgggtggatcatgaggtcaggagttcaagaccagcctggctaagatggtgaaaccctgtctctactaaaaatacaaaaaataagctgggtgcggtggcaggcgcctgtaatcccagctactcgggaggctgaggcaggagaatcgcttgaactcggagggtggaggttgcagtgagctgggattgctccactgcactccagtctgggcgatagagtgagactccgtctcaaaaaacaaaacaaaaacaacaacaaaaaagaaattaaatgaaagttaaaaatttagtctctcagtgtattgatttgctagggcagccatgacagtctcacagatggagaggcttgaaaacagacatttatgctgccataattctggaagccagaagtctgagatgaaggtgtgagtagggctgggtcctcctgaggctgacggggatctgcccaggcctctcccagttcctgctggtggccggcgtccttgatgttccttggcttggagaagcgtcagccgcatctctgcctccatctccacaaggcgccctccctgggtctgtatccaaactcccccaactccttcaaccttttttattttaagagatgaggggccgggcgccgtggctcacgcctgtaatcccagcactttgggaggccgaggtgggcggatcacgaggtcaggagatagagaccatcctggctaacacggtgaagccccatctttactaaaaatacaaagaattagccaggcgtggtggcgggtgcctgtagtcccagctactctggaggctgagtcaggagaatggcgtgaacccgggaggcagaacttgcagtgagcggagatcaggccactgcactccaccctgggtgacagagagagactccgtctcaaaaaaaaaaaaaaaaaaaaaaaaaaaagagatgagggtctcattaagttgcccaggctggtctcaaactcctgggctcaagtgatcctcccacctcagccttctgaatagctgagactacaggagtgcaccaccaagcctggctcattttcctatttttacatttattattattattgttattattatttttttgagaaggactctcgctctgtcgtccaggctggagcgcagtggcgcgatctcagctcaccacaacctccacctcctgggttcaagcgattctcctgcctcagcctcccgactgggactacaggcacgcaccatcatatctggctagtttttgtatttttagtagagacgggattttgccatgttggccaggctggtctcgaactcctgactcaggtgatccatctgcctcccaaagtgctgggattacaggcgtgagccaccgtgcccggccgatttccccatttttataaggccaccagtcacatgggattaagggcccaccctgctccagtatgacctcatcttaactaatgccatctgccacaaccattttccaaataacatcctatgctgaggtcctgggggttaggatgtgatcatgtagattttgatgggacagttctttattttcttttatattttagagacagggtcttgctctgtcacccaggctggagtgcagtggtgtgatcatagctcactgcagcctcgatctcttgggctcaagtgatccttctgccttgggtttccgagtagctgcaattacaggtgcacaccaccacacctggctaatttttatattttttgtagagacggggctgggtgctgtggctcacccctgtaattccagcactttgggaggccgaggcaggtggatcaccttaggtcaggagtttgagaccagcctggccaacatggagaaaccccgtctctactaaaaatacaaaattagccaggcgtagtggtgcatgcctgtaatcccagctacttgggaggctgaggcaggagaattgcttgaacccgggaggccgaggttgcagtggactgagttcgtgccactgcactccaatctgggtgacagagcaagactccgtctcaaaaaaaaaaaaaaaaaaaaaagagagagagagagagagacagggtcttgctatgtttcccaggctggtctcaatctcctgggctcaagtgatcctcctgcctcagcctcccaaagtgttgggactacaggcatgagctactgtggctggccaattgcagacagatggaactgtggccagccacttcaccagtgaagtcccaaacacccctctgcaggcatgataagctagggtagttcttatcttttcctgattcctgttctctgtgtgtttagtggggaccacagcaggcagggtggggtgttggtggaatttgggataagtggagtctgggcaggcctggagctctctgtctgccttctgggcccgtgttggctgaccctgttgccccctctgccctgctttggctgagctgaattatttcttggtccttcccttctgggggcttctcgcttaacctcctttgttgtccctgataaaggggccttgttagcccgcaccttccctccttcgtcacttgacttctgcctgctcattctttgtaccttagttttagcgtcacctcctccaggaagtcttctttgatttctcctcctccctaggtctcctctaggctcccacagctgcctgtgttccctgcatgacagctctgctttatactgggcacaactttccctctttcttcactcatctgctctggctcatcttttgagtttcagcttaagtgtcacctcctccaggaagcctcctctgatttcctctcctccctaggcctcctctgggcttctcccagctgcctttgtgtcctctatcccagctcccatcacccctggtcacacaatccacctcctcctttggacttcgagctccgtgtcggtggatagtgtggctttgctggggtcccggctgtgtccccagcacccaccacacggctggcacacagtaggtgctcagtgacccagcagcacactcagaaactccctttctagccgggcgcggtagctcacgcctgtaatttacagctactcaggaggctgagacacaggaattgcttgaacccaggaggtggaggttgcggtgagctgagatcaagccactgcactccagcctaggtgacagagactacatctcaaaaacaaacaaacaaacaaacaaacaaacagaattctcacatgctgctggcagggagagtgcttgattctttatcattatatctgaggaaactgagactctgagaggtgaagcgacttgcccaaagccacacagctgggaaatggaggagttgggatttgagcccaggctcttaatcggcaccaatgccacttctcacttgggacagaaaggaagccctgactccttaggcagctgtacggagcctgggatgataacgtgctgagagccagggctactgtctgctgcaccctggggctcagtctccccatctgtacaaagggacgttccttaggtacctccagccctgagacactgggttttaactttaaatttctgatgaacaacaaatacttttttagtataagtatgccccaaatatgaataaagataaatataaatacctgccaccgacccctgcacaaaccgcaggttccagactacaagtcccacaacccactgcggcctcccttaggaactgactatcatgactttctatttttcattcattcattcaaaaatggtataggccacccgccgtgcgccaggtcttgtgctagatgccggggatacatcatatgcacaaaacagacaaaagtttttgccttcgtggagtttgacatctacatcctcgggagttttaagtgatttttgtttttctcagcaatttctgccaggacgactacagttcccgtgaccctttgtgtgtttgacgggactacaactcccagaagacctagcgcgccaggcaggcacttccttttctctttatccccaacttccttccaggtcgcaaggtcacgtcctgtccccacctttcgcccctcaccctagctcccccaacgccaaagacaaggttaagaaagtgatatcgcgaaatagttttttaaagcattttattgcattttatgacttggagtttatgtgaaacctcaacggtattagccgaacagcctgccgcaccttccgggagttccagagtgggcctacaactcccacagggctccgcgagcgccggacggacggactacaattcccgacaggcagcgcggctggcggggcggttcgccgcggtgcccacaggacctcagggcgagtgcgggctgccccgcgcggcgcccgcaggaccccggcggctacccatgccgaggtgagtccgcgggagccgccgccgccgccgtcccgtcccagctgccgccccgcgcggccccgccgccggccaggatgctggaggaagcgggcgaggtgctggagaacatgctgaaggcgtcttgtctgccgctcggcttcatcgtcttcctgcccgctgtgctgctgctggtggcgccgccgctgcctgccgccgacgccgcgcacgagttcaccgtgtaccgcatgcagcagtacgacctgcagggccagccctacggtgcgtgtccccggcccaccctcggggctccccgggctccccggccacgccactccggcccggcgatccccaggccgatccctagctccggcctgggctgcccgacccatgctcaggccccaggcgaggcagagccctgccgccctggacccccgggcgccctggaatccctgctctccttgcctagcgcccagggaccccccgcgctcgctcccacagcccccggcccctgcctaggtctccctgccccggaacccatggccgggccaagcgtcccgcgtccctggagccctaagtcccctctctcctgtccccagctgggccggcgtctgcctgccttgccgagtttctccctcctgggccccctccgccccttaggcttcctggtccgggctcacttgagcagacgctcccgtcctgacctccagctcccagggtcctgttctggagaccatctggttggtctctggattcactgggtcacgtccgtgttcccaggcctctcgcctttagctgactgcgtttggagttaaaggtccctgcactgatttctgccaggctgagccacccgacgcggtggtccagcattccccaccccctcccacggccctgggtgccaagtgcattttgtccagtgcccaaattcaactcccctgaattttctcgctctagtcaccggcccccacgtcaagggcacatttgtccccagacccctgacgctctctggtcccagttcgtgagtcatgtttcagaatctgctagcccagcttccctggtctcctcccacgtccccagttcagtccactcgcctggggttccctttgaccccctttctgtcccgcctttgatgcatacccacgccctcagctcagcctcctcacacccacttcccagaaccccacttgttccatctttccaggatttcctcttccctttccaaattcgcacccccttgcccttgcattctgcaagtctcccactcaacagcctcgccccctcccgtcgtggccctgaccccagtgtctagaccattccacatccccttgtctttgcctggctatagctgtccctgacattccagaacctggtccctggtttttcttcttttcagcctggcccctcaggtccctggaagtcaaggcctggccttccctgtgaaggagtcccgtccgcttgttctcctggcccccttagttcccagcccggattctcttggattggtccctctcgtcacatctcaggctcaacctgaggcgcggggacccccagcttctgccagcccttggggagcccatctctggagatggaaccagactttggcctcaggtcccattttgccccagagttacgatttttttacttagagccattgttgtcaaccgaggggacgctgggtgatgtctggggacatctgtggttgtcacgaccacgggtgctcctggcatggagtgggtggaggccagggacgctgctcaattccctgtagtgcccaggacggccccaccccagagaacgatccggccctaatgtccacagtgtccaggggaagcgccctggggccacagtggtggtgtataaacccaaggcccaggctctggagggtgggagtggaaggccagaggctcctcatgcagtgaccgcgttttccgtgctgcttgggattttcccgggggaagggtcctgacgggcaccatcctgtagaatcgcctccatctttgctgcctggcacaggagccagcagccacaggaggctgccgagcccccaaagcgtggcctgtgcaaccggggggcaggattttcagcgctgcttgagggtaataaacgcaagtagccacgcgtgcctgcggctctcatagcggcttccgtggggtttccagggcagtctgcaccccaaagaccccactcctagagctcgagataccctgttcacactcttggcatctcctgcctggtcctccagctcacccggcctccctccagccccccgggcaggtgtgatctggtggctgctacactgtccctgggcaggtgtgggccccctttctctccccaagaacccacccagggaatgcatgttggcggctccctacactgtccctgggcagatgtgggccccctttctctccccgcaagtccgcccagggaatgcatgttgtctatcgagtgagcagatgtctccccgttccacggccagacggacgccctctccagcctcctagagtccctcccagtttccttgtgtggcctcttgttcttcgcagcctcctgacgttcaccccgttttccttccccgattccctcggcccctttttggtggcgcctccctccctttcccctgcagtcctttctctctttcctcgcttctctggggcctttgcccacaatcctgggttttcttctgagtcttcttttcactggcctcctcccctgtaccctcctccctggaccccagcttttctttctcctagtgaggaagctggacgcagctttccctgtatgtggcattcgcccagctggtccgtgggctcccggggtgagcggaggagcccatggggcagccgccctgcctcagcctccatgctcctcatctgcgccctgggaagcacagtccagctctcgcagggtaggcgaggcccagccagcacacccctctgtgtcactctggccgcccctgagagactgggggtggtttgggccagagccctgccgaggacaggcccttgagaagccccagcgtgctgcctttgaggccaccctccaccaccatcttcccggtgtgctttcacccccgggcccactacccggaggagctgcaacccttactcgctggggagtcctttcccaacttccttcctgctgctgttgagaggcacagggcggggcggtgccctttgtgtttgggtgtgatctgggtctcactggccaggtgcacagcacccctctcctgggagtggactctggccctgccgggtgaaggctttctcggctcggtggccgttcacagcaggtggggctcgttgagcttatggcccatgtgaggtgggaaccttagcaccccttggagcgcccagctcccaggacccgtcaagtccatcagacttgccaaaactccttcatctgggatacagctaactgcagcctgtaggtcacgtctggctctctgcctgttgttgttaataaagttttatcggcacgcggtcatgcccatccattggcatcttgtcgctggctgcttccacgcagaaacagctgagcccagtgattgtgccagagccctatggcccgagaggggaaaggttggccgtctggcccccgatagatagacaggtgcccaggccactgttcaggtccagtcctgtcacgccaactggtgacttctctcaggatgcccggtgccctccatggcgtccaccacaagtggtctcagcccattcagacgcgggtctgagggagttggtgctggtttcgcctccgcagagggccgtgtccacactagcttgtggccacccggcccgaccctggccctcgagggaggctggggccacccaaggccatctgttctcctggggagatgggccttggccacagagagcccttgccattgggccccgagcgagcgggggctgggatccagagggcagtgtggccttggctggtgctgacgcgaggcggggctccgatgggcggggcttcggaatgggaggccgtggccttcagggagctctgggtgctggtgtccccctccgttcctctgacttgctgctgctccttcccttctccctcctcgctcactccctatcccgcctgcgggagctcgaggcccggagaacgggggtgcctgccagttggcctcatctcccggccccaaaggggtgacattcgagtcacccctgggaggccagggcatgtggggacaggtggggtgcaggggaggggtgctcccagcactgcaggagccccaaggactccctcgaggtctttgctgccatgtccctgaggggcctcccaagggcagaggaaaggctcccagcaggcctggtgatgtcaggctctgagaggggagcaggggtgaggctgctgggcctggggtgcgtgggcccctgtggctcctccatcccaggcctcagagctggttctctgtgcccacctccttgtgctgcacccgagaccccgcccattcccacctgagacctgtgtcccgcctgtccccccatgcacccagctcagcccatcagacaccccgttggagcaggctgcttccctcccaccgcttcccagacagcacattgctggacacagagctggggactcatgcacgcccctggccccaagcccgaggctcagcgcaggccccgggaagagctgcgtctgtggggagatgagagaatgagggtccccagcatccagcatccaccttcagagcgaggctggctcccacggggacgctggagtcggtcctgggcatcgtgattttgagtgcttcctgcacgggtctcacacgggaggctccggggcccgcccccggcccccctgcgtcaggcctgtacccggcccccctgcgtcaggtctgcttgcgggctttgcgtggcattctgttggcttgtgcagcgctgagatgttttagagcgttgcttgtcttttaacatttgggtgatgtgacgtaagaattgggatttccggcttctggggtggtccactgaggtccgtgtccccagctgaacgtgggtggcccttttagaggggccggtgctctccagggtctttccagggcaactcaggtggccatcgcggtgtgtggcgggcagcagggagatcgtcgtggtgcgtggcgggcagcagggagatcgtcgcggtgtgtggcgggcagcagggagatcgtcgcggtgcgtggcgggcagcagggagatcgtcgcggtgctgagacttgcaggggtgaagtggcagcaagtggggggtccgtgtgcagctcaggtgtgcggagcagggacccctgagctgcgtcttgttgggtggaggacgttttgctgagagaggagggaagagcagtcccaggaagcaaaaggcagcggcgaaaccagaagccctggcgagtttccagagcggtgaccgtggggagcgccaccgcagaagtgaataagcccgtgatggagcgacagccccaggctctcagcgacggccgtggccttccagggaagaccccgcctcgccccagagacaccatagcccaagctgctgagccttctgccaccccagcccctggatttctagaaagcttacgtgtccaaggcgcagtagggtggtcctagagcaggcgagcccgaggggcgctccatgctggtcttgtggctcaacacaggggtttaacctggggcccatcaacaggcttcagggaagggccgtccccatctgggaccccctgtaacaggagttgaatccagcctgcccttggcctatttaagagttttgttggcacacagtcccacttgttggcttacctgttgtatatggctgcactcaccctgcctgcagttttacagctgagtggttgagacacagaccggaaatactcactctctggcctgttgtagaagaggtttgccgagccctggtctaggatcctgtgtagacttcggtgtggggtgggaagtgtgggtttctcccaggagaaggggctctgctgtcattagaaaggggccgggcacggtggctcacgcctgaaatccctgaactttgggaggccaaggtgcgagtatcacctggggtcgggagtttgagaccagcctggccaacaggcaaaaccccgtctctactaaaaatacaaaaattagccgggcatggtggtgggtgccggtaatcccagctactcgggaggctgcggcaggagaatagattgaacccgggaggtggaggctgcagtgagccgagattgtgctgctgcactccggcctgggcaacagagtgagaccctgtctcaaaaacaaaaccaaaaaacaaagattctcaggaggtctgagacccagggttcgcgtggcactgagcctgtgggcatggacccggcacgcgttcatggcccctgtgacccgttatgtcgggggcaggctggggggaccctgggagcttctcgaatcggtggtcttccaggttgtgggctggggctggggctggggctgctgagtgggtccctggcctggatctgtcccctcccgtcggcctggccacccgccgaggctcacgaccccgcccctgtgcccacaggcacacggaatgcagtgctgaacacggaggcgcgcacgatggcggcggaggtgctgagccgccgctgcgtgctcatgcggctactggacttctcctacgagcagtaccagaaggccctgcggcagtcggcgggcgccgtggtcatcatcctgcccagggccatggccgccgtgccccaggacgtcgtccgggtgagcgtctgccctgccccgcccggctcaggtccagagctgcggcgggagttggaggcaactgtgtgaccctaggcgggtcacttcgcctctctgagccctttggaaagtaggatggactgttcccctgctccattgatctccaaggggtgattctgtcttcagaggacgctgggtgatgaccggaggtgttcagggagggccgctccgggcgtggagtggatggaggccagggatactgctcagcaccctgcagtgcccaggacggccccgccccagacagtgatctggccccagggtccacagggctgcgcaggagaacctgcctagagtgaacaagacctggtagaatccagcagacgccctgggtgaagatacttttgcagatgagaaggggtgggtgggttgggggaagccctggttttctgtgagtgcctcatggttcatgccgccctctgagggcctgcctgccctccagggacagtcactgggccccctgctaccccctccagggacagtcactgggccccctgctacccccaccagggacagtcactgggccccctgctaccttgccacccccaccaggccagcagccccctaagtgtgtgtctgctccacagcaattcatggagatcgagccggagatgctggccatggagaccgccgtccccgtgtactttgccgtggaggacgaggccctgctgtctatctacaagcagacccaggctgcctccgcctcccagggctccgcctctgctgctgaaggtgtgctctgggctgcagggacggggcccgtgggcgtgggtgtggggaggcgtccccatcccaagggctgcggtcaccctgggctgtttctgctctcagcgtgtggcatcccttcgccggggttaacagtgggggttcctgggccccgtgtggacctgctacatcaccacctccgggctgggacctgggactctgcatttttgcagccgcctgtcccccctcccagctgctggctctgtgcacacgaaagaccagaaccacggactcaggaggagcctttccgatcctcaggggctcggggtttatgaaacacacgggcatctgttcagttctctacctgccaaggacattctcagcatcacatctcgagtgggcggcgtgggtgcgtcggcggtgtccttacggagaaggggcacacgcctttcctccagccccgtgaacgggggccctggcagcgaactcagagcaggaacccggagctctgtggtgggacctgtggtggggaaagatgggagttgccgctgtggagagtgaggagaaagaggaactggagaagccagctgaggggcttgcccggggctgtcatcagctactgggggagcagggctgagaagggaggccagagcccagggccgcagagaacaggcaggtgtgtcctggcccagccccaacaaaaacagtttggtgctgtggtttcaagctatagtaaaggaggctgaggcgggtgggtcccctgaggtcaggagttcgagaccagcctggccaacctggcgaaagcctgtctttactaaaaaaatagaaaaagttagccgggcgcggtggcaggtgcctgtaattccagcaacttgggaggctgaggcaggagaatcacttgaacccggaaggcggaggttgtggtgagctgaggtcacaccattgcactccagcctgggcaacaagagcaaatgtccatctcaaaaaaaaaaagtttcatcctacacagccagatcagtggaattccagatgcagagttggctaacactggccaggggccacctgtttttgttgataaagttttattggcactgggccacattcatttatgcacagtccacggtggctttcccagcagcagaactgaattgccgtggctgcggcagagaccatccagcctgcaaagccgaaagtgttatctgatcctttgcagaaaacgttcccaacccctggtttagattaaaagtcttgacagtggccatttttgttgtggtaatagaagagtatagttctgcagatacctaagtatcctgttagagaagaaggaaagaggagtcgtcttctttttttttttttttttcttttatgagacagagtctcactctgttgcccaggctggagtgcagtggcacaatcttagctcactgcaacctgaaggaggaatcttctacttggtggagtattatgcagctggtaaaaatgatgttgagggccaggcaaggtggctcacgcctgttgtcccagcacttacggaggctgaggcaggaggatcgattgagggcctggagtccaagattagcctgggcaatatagcaagacccttgtctctacagaaaatttaaaaaagccaggtgtggtggtgcatgcctgtagtcccagctgctcaggaggctgaggtgggaagatcacttgaacccttgaacctgggaggcagaggttgcagtgagctgagatcttgccattgcactccagcccgggtgacagtacgatactccgacttgaaaaaaaaaaaaattacagagagttcccaggagcatgcttcccccagtgatcatatctttttgttttgttttgttttgtttttttgagacggagtctcgttctgtcacccagactggagtgcagtggcacaatctcggctcactgcaagctccacctcccgggttcgcgccattctcctgcctcagcctccagagtagctgggactacaggtgcccaccaccacgcccagctaattttttgtatttttagtagagacggggtttcaccgtgttagccaggagggtctcgatctcctgacgtcgtgattcgcccgcctcggcctcccaaagtgctggtattccaggtgtgagccaccgcgcccggccgatcatatcttacatacctatgatgattgtgttttcatttttattttattctttcttattatcttttattttatttcaaaagattgtatttttaggccaggcacagtggctcattgcctgtaatcttagcactttgggagggtgagacaggaggatcgcttgatcctgggaggtagaggctgcagtgagccatgtttgcgtcactgtactccagcctgggtgacagcatgagaccctgtctcaaattaaaaaaaaagttgtgtttttaaaatgctttaaagcacagaagtgcggactcaaagttgtgtgaactcacaggcattttcgggcaggtcctggccctaagtccctaagtgaacagctgttattgagggcccgggaggaaaggatcagaatggcatggaggagaaattccccagcagaacgttccagaaaggagatgtgaataatttcgagagaaggttgtcctagggggagcacgggcatcctgtggtatcgaaatctgctggtcacgtccccacacccggctggttggctctgcccgagcccccaacctggggtgtcagtgctggggatgccccctggctggggccctggctgggccaaggctgatgcgccctctccctctccctagtactgctgcgcacggccactgccaacggcttccagatggtcaccagcggggtacagagcaaggccgtgagtgactggctgattgccagcgtggaggtgagtgccgcctgccccggagccagccccacgtccccaggggttcctgccatccgcctggctccccggctcggccgtactagaggggagccgctgatgggaaactggagtcggatcgcccccctgcctggctgaaaacctcctgtggctccgctggcagctgcaggaacccaaactcctcacatggccggggagtcgctctgtggagtgcccaggcccctgccagcccccggcccatctccttccttccatcatggacccccacacaccaagccgctgcctcccaccccagggcctttgcaccggctgcccctcccaggaagccccctccaggctgcagtgtcgccagccccctctcatcacataacctcacccgtcagcccagacgctgcgtcctcacagacccttccgagcaccccgggatatcagcagagtcaagagagggtggggagctgccggtgcggaagtagcctctcggatcatcagggcagatccagagggtgaagcctgtgtcgctgctgctgcagcactggcaggggccttaaaacccgaggaagcacccaccgactcctctagcatttccctgcgggacggcgccggtgaggggtgcagatgagtccacacagatgaggggttgcctcactgtcgggggagccctgaacaagacgtgcttgctgttttggggacccaggccttgttggggggtgcccgagtggaaaagcagcggcttaggccggggtggggaaagtgtcctggaggccccggctccccatagacaggccttggcggaggagccctggggtttgtcgatggcggctgttctgtttgttcctgttggattgtactgtgggcccgggaggcgcgtcctattcccagcgccagttagtgtgcagtgagacccggtagcctggcctgcgtcactccacagtggcacaggcgctgggctccgcatcccatggggccatgtcgattccctttcccctggctgtgccctttctcctgtgagcagagccctcttggcagctgggctttgagttcagccgttgaaggatctccaagtggaaaagcatgttgcaaaaacagcaagtagactcccacagccagacggggagtccccaggccacagccggccctctacctgcttttgtaaataaagtttttgcttgtttgtttttgttttttgagacagagtctctctctgtcacccaggctggagtgcagtggcgcgatctctgctaactgcaacctccgcctcccaggttcaggcgattgtcttgcctcggcctcccgagtagctgggattactgtcatgtgccaccacgcccagctaatcttttgtaattcttttttttttttttttgagatggagtttcgctcctgttgcctaggctggagtgcaatggtgcgatctcagctcactgcaacctccgcctcctaggttcaagcgattctcctgcctcagcctcctaagtagctgggattacaggtgcccgccaccacggccagctaatttttgtatttttggtagagacggggtttcaccatgctggccaggctggtctggaactcctgacctcaggtgatctacccgccttggcctcccaaagtgctgggattacaggcgtgagccaccgtgccgggctgtgtaaataaagttttatggcacacagccatgctgatgcatgtgcaagccgtccatggcagtttcttagttgtaacagacaccatctggtccccaaggctgaaaatatcccctctggccctttatgaaagtctgctggcccccgggctagagcagaatccgactttggtggggtaagaggcagggaggggtgcacacagaccctgaaggaacccgaatgcctggctgaggggctcagccccgttcccacaaacagttatcctcctgaggggctcagccccgttcctataaaaacttaacctcctggccgggcgcggtggctcacacctgtaatcccagcactttgggaggccgaggtgggcggatcatgagatcaggagatcaagaccatcctggctaacatgatgaaaccccgtctctactaaaaagtacaaaaaattagccggatgtggtggcgggtgcctgtagtcccaactactctggaggccgaggcaggagaatggcgtgaacccgggaggtggagcttgcagtgagccgagatcgtaccactgcactccagcctgggcgacagagtgagattccgtctcaaaaaaaaaaaaaaaaacacaaacaaaaaaaaaaaacttattctcctgctctccccgatttttaaagatttcgacctgagggccagagcaggagtgggtccctgttcccggctctacctcctccctggaggagctccctggggctcccagagtcagaggctggcacctcctgtggtcctcagtgctgaggccgatgctggcacccagcggacgggccccacgtggcccagaggggaggggtctccaagccccacacacgggtcacctgccccaggaacagccaggccattcccctgctctctatccacaggggcggctgacggggctgggcggagaggaccttcccaccatcgtcatcgtggcccactacgacgcctttggagtggcccccgtacgtatgtgtgtccccattccccccaccccacagggcttggattctggctccagtccagtgccgaggcaaagcgcctgtaggggatggcggccagggtcagcggctctccctgtgacggcctttgcccgtcatcctggtccccgcgagggcctcagggtgggtgtcgtggggctgaaacaggcccggctcttgccccggggtcgcaggttccagggcacggcggtgtctgtgtcagaggctgagcccagggagtctgagtcagggttccccgggccagcgctgggtgccgtggctccacacgaggcctcctcgaggctgtggtttgtcccagcgagcggtcatggagcacgtagcagagtccgcgaagggaaaggcgcgtgcggtgagttggggaggccagtcctggcttccaggccctctccctgtgtgtcacgtggaacacgcctcattgtcagcagtgagctgggacgacagcccaaagcactgtcaccagcgagacttccagagacccagcgcccggttcctatgggagctggttctacagcccctgctgcctggcccatgccgggattccagactccggagggaagcagggcccgtgtgtaaaccatggtgtttgcaggaacagctttggacccagagcctgtcctgtcagcgagggtcgggggccctgctgcaggttcctggtctcaggcctgcggcacaagcttggttctgctcagcgtgggttgagcgggagtggggtgggggggcatgtaccacggtgtcaaccagcaccctgcctcctcctttttttttttttttttttttttttttaattgagacagtcttgctctgtcccccaggctggagtgcagtggcacaatctcggctcactgcaacctctgcctcctgggtttaagcgattctcctgcctcagtctcccgagtagctgggaccacaggcacccgccaccacacctggctaattttttttatttttagtagagacggggtttcaccacgttagccaggatggtctcgatctcctgacctcatgatttgccctcctcagcctcccaaagtgctcggattacaggcctgagccaccgcacccagtcctgcctcctttgaacacaaatcagctgaaccaggcagagtgcggagggtctgggcagatctgctgcctggctgagtgcccgaccccttggagggccaggcccccagccttgagaatgcctggtcccgctgggcccacacaaactcaagctgctcagagcaatgcctcttgaactcctgacctcaggcaatccacccgcctcggcctcctaacctgctgggattacaggcatgagccaccgcgcccactgcctttctctgtcctcattgtcccctatgaagctttttttgttttaaatttattttatttatgtatttttttttttttttttgagacggagtctcgctctgtcaccaggctggagtgtagtggcgagatctgggctcactgcaaccttcgcctcccgggttcaagcgattttcctgcctcaacctccggagtagctgggactacaggcgcgtgccaccacacctggctcattttttgtatttttagtagagatagggtttcaccatgttggccaggatggtcttgaactccagaccttgtaatctgcccatcttggcctcccaaagtgctgggattacaggcgtgagccaccgagcccaggcaaatttattttttgagataatgatagaacataaagttcaccattttagagcgtacgagtgggttttagtacatccaaagttgtacggtctccacctctaattccagaacattccatcaccccaaaaagcagcccctccccatcagcagtcactcctggtcccctccccagccccagaaccccagcatgtgcgcatccgtcccagtgcctgtggactggcctgttggacgggtcctatgaacagatcctacactgtggacaaagtcttttggatctggcttctctcactgaggagggtgtttattgtccccctgaattcagtgccaccgaggtcccctttatatgctgtggccttgggacggtcccaagccattgcaatgtccaagaaacagtgtggccttattgagaatgctgctttagatcacaaaggtgcatccaagggcgggaagggcatgtggtcgggctgtgcaggtctctccacagccggggctcgagggtggaagggtgggtcccacagaggggaccccgcacagagaccagggctggacagatgctgccctctgtgagcgaatctggcctggccctgggctccaaattctgcatgtagcttctcccgggcgcgggccgagccgaggtggatgaggagagtcctgggcttggcggggccccgcagaccccaggccatcagtcggggattgaatacaggaggggagcgaccacagctgcccactggacgtggcagaggggctgggggacagcacagagatgaccgtggctgctgtgggcagaggtcatggggctacgggagtagggtgggggtgacggagagatgactgtggctgctgtgggcggaggtcatggggtgcgggagccgggcgggggtgactgtggccttgcctctcccgtccctgtagtggctgtcgctgggcgcggactccaacgggagcggcgtctctgtgctgctggagctggcacgcctcttctcccggctctacacctacaagcgcacgcacgccgcgtgagtgccggggtgggcagggggatgggggtgcgggggccacactgccggacagcgctgcccaccaggcacctctgcagatgtttctctggagcctcctggccccaaagtgggcctgagcccaggaattggggcgccttatttatcgagggctaagctgagccctcgcaggctctgtctcttggagtcccacagggcccagctgctgctcaccccaggaacctgctgggaatgctgtcagctgcaagtgttagagacgcccggttaagggccctggaactaggggatcccctcagccctgtgtggtcggggccggatttttcgctgggggtgggggccgtcctgggcactgcagggcgctgagcagcatccctgccccactcactccatgccaggaacacgccatagtcatgatagccacaggtgccctccgacatcacccactgtccgctgggggcagaagcacccctggttgagacccccctgggttagggaattccacgggcccccgagagactatgtcccgtgatcatctgccccgctgaggtcccaggaggctgcacacattgaaatccacaccctgagtaggaagggagagaggaggtgaatcccaggagctggggtccccctggtttatcccgtctaccccgttgggagtttatcctggtgtctggtgtgagcagggggcagacttgatttttccccagataatgaatgcaggcttcgtccccgtggccctgtggatgtcttctgtgcatgactctctcctgggtgccacccactccatcccaggagcacccccagacgtagcaaccacagatgtctccagacatgactgtgtctcctgtgcggggtggggtagaatcacctccgggtgagaccccggcccagtcacctgctcccgagatggtactgctgcagtcattgtgtcagcagctcagagaggccagggccactgtggctgagacgtttctcagccttctcacagtcacaaggcgccgggagtcatgtcctggttcaggcaggaacttggactcgaactcctggcctcaagcgatcctcctgcctcagcctcctaaagcactaggattacaggtgtgagccaccatgtccagccaaaacttgtttttttttttttaagctgcagaacctcttcccccagccccccactgatgccttttgagaagctcatgctgtcaaaaacgtgtgaacggggctggtttctgccaggcctgggggcttcttggcagctggggagaggttgggtttctggggcagagggaaactgggttggagagagtccggggcagatgtgggaagatgggggtagggggcgtgctgagcagtttccttctctgactctggtgacccttctaatagccaaggctgtgttccattagaatttttggcctgcctgggtggcttatgcctataatcccagcactttggaagcctgcggcaggtggatcacctgtcaggagttcgagacctgcctaacgtgttgaaaccctgtctctactaaaaatacaaaattagccaggtgtggtgctgcatgcctgtaatcccagctacttgggaggctcaggcaggataattgcttgaacccgggaggcagaggttgcagtgagccgagactgcaccattgcactccagcctgggcagaaagagcgaaactccgtcccaaaagaaaaaaaaaaaagaattcttcttctttaagtgaatagactttatttttttgatctcctcgtgtctgttgcctggtcggtcaccccggttcctcctgggctcagagaagcctctagagctggggtctaacgtggggtggccctgctgcctggagacactgagtgatttgcagttgtcattgggggaagctcccggtatggggtgggtgaggccagggatgccactcagcaccctgaagtgcccaggacagcctcacctcagagaaccatccagccccagtgtccacagggccgaggggtcatgccccgccctaaggggctggtcaggatttcctgctttggggagaccttcatacccttcctgggggacctgtgacctggcctggtccctcctccaccccaggcgcttgcccgtcaaagctaacactgggtcttccctcccagctacaacctcctgttctttgcgtctggaggaggcaagtttaactaccagggaaccaagcgctggctggaagacaacctggaccacacaggtgagcggccccgggtgggggtgggggtgccgcggtggtggtgccgtggggaggcacggaggcccaggggttgccatgggggcagccaggaggcacagagggagggccgggggccacttcctggtccccacccaccccgccagctctcggtgtcctgcagactccagcctgcttcaggacaatgtggccttcgtgctgtgcctggacaccgtgggccggggcagcagcctgcacctgcacgtgtccaagccgcctcgggagggcaccctgcagcacgccttcctgcgggagctggagacggtgggtgcccctttcatggatgggtccggagctctgcggagcacacacatcggggccgggttggggcatcctgtcccagggtgtccttgctgtccgcccctcaggctctgagggccacactgtgtcggggtcgggctggggtgttctgtcctggggtgtccttgctgtccaaccccggggctctgaggggcacactgcgtcagggccgggctggggtgtcctgtcccagagtgtccccttgtccctccttacccactgctcattgcccgccggggctccagcaggccttagggggaccccgggggcaggtggatttctcctcattttgcaccctcgggggttctgggaggcccctggagcatttggggaatgggctggggtggccgccatccccgcctgccctctgctaatggcgcctccggctgcaggtggccgcgcaccagttccctgaggtacggttctccatggtgcacaagcggatcaacctggcggaggacgtgctggcctgggagcacgagcgcttcgccatccgccgactgcccgccttcacgctgtcccacctggagagccaccgtgacggccagcgcagcagcatcatggacgtgcggtgagcgcggcagcacctgcccggcccctcctagggctttcctgggggctgagccactggtcgcaactgcagaggccatgagagcctggagggagcggcccccacacacaggctgcgaggaaggggccggtgcgtggccaaggccggctgcacggtcaggccgttcgcaagctcttccttactggggctagggagggcgaggccagcagcctgaggtcgtggccccatataggacccccagaccccgtcacctgttgagttaggagcaagcagctcctgcctctgggcctcttcagggccctgccacagcccgaaagtcctgcctggccccggccaccgtcttggggagcctggcccgccaccacaccccggcccttcctcgccccgcctccctctgggcactgtgtctctggcttcttatgtcctctgaccctgtgtcctgcccgtctctctgccatcatgtgagcccctgggcaggcttttgtggagcctggaactgtctggccaccccaggcacactcctggccagtcctggcaccagcaggtgggcgccgtctcctcccccagcgcccgcagtcccggcatagatccttcccgttcatccactctgctctgcggtcactgggccctcaggagtggtttgagctcagccatcggaggcctgcagaagccagtggcgggagggaggggcacatccctgggtaatcgcagtcctggaaaggatggaggtggcggtcgcccaccagccaggaaagattgccaggaaatgagggtgggtgcacggctgtcccagctgtgctgagctctctcaagaccaccaggggtcagcccaggagggccacctgggatttgcagagggtcccagaatggattcttccaccaggacggaatagtccagtttaaattctggaagagcagaaaaccgagtcagaaggaaccaaggcctcagggcgtgagccttacctgcgcacagggacgggtcagggcaaggggcctggaggtgtggggcccccagtgaatctgcatctacatgttagccaagtagttaaagctaagcttaatttttttttttttttaaagacagagtctcacggtctcctaggctggagtgctgggattacaagtgtgagagctaccttgcctggcccaaagtccacattttaaaacattgtttttgaatcgtgaaggtcccgggtggattctaagaccctgacccgtaacacgaggatcattgcagaggccctgactcgagtcatctacaacctgacagagaaggtgagccctgagccctctgtgccgccagacccagccccagccctgcccccggccccggccccacccctggccccagccccactgcaggggcctggactcagggccatcccctcctctctccgcaggggacacccccagacatgccggtgttcacagagcagatggtaagggggccaggccagtgggtgggtgggtgggcggggccaggccatgactaccaccaccgtccctacagcagatccagcaggagcagctggactcggtgatggactggctcaccaaccagccgcgggccgcgcagctggtggacaaggacagcaccttcctcagcacgctggagcaccacctgagccgctacctgaaggacgtgaagcagcaccacgtcaaggctgacaagcggtgaggctggggctccgcgctggccccgttcagcctggggccgagggggacctccccctactgcatctcccaccccctcacccctgggggatgccaggtggagcaaatacaaagagagggtgggatgagggccggacacggcggctgtgcctgcaatcccagtactttgggaatccgaggcaggtggatcacttgaggtcaggagttcaagaccagactggccaacatagtgaaacctcatccctactaaaaatacaaaaattaggcggatgtggcagtgggcacctgtaatcccagctacttaggaggccgggacggaagaatcgcttgaacccaggagttggagaccaacctgggcaacatagcaagaccccatctctacaaactttttaaagtttttatttatttgtctttgagatggagtcttcctctgtcacccaggctggagtgcagtggcgtgatcttgtctcactacagcctccatctcccggcttcaagtgattctcggacctcggtctcctgagtagctgggattacaggcacccgccaccatgcccggctaattttttttaatttttagtagagatggggtttcaccgtgttggccaggttggtcttgaactcttgacttcaagtgatccgcctgcctcaacctcccaaagtgctgggattgcaggtgtgagccatcgtgcccagtctccatctctacaaacccttttttaagaattagctgggcgcagtggtgccccctgagaaagtgctctctccccagggacccagagtttgtcttctacgaccagctgaagcaagtgatgaatgcgtacaggtgagtggtggccagcgggacctggagcccttcaccccctacgggttacagccgaggggactgcggcccacgggggtctaggggttcatgttactgccgcgcaccatcctcgacctcagggaccctgctttctccacagagtcaagccggccgtctttgacctgctcctggctgttggcattgctgcctacctcggcatggcctacgtggctgtccaggtgagcagtgcccaggctcaggtggggcaggggccgcccgccgggaggagctgggctgggcgtctccaagtgcatcctggcccctggctcagcctagagtcacatgacctggggctctggccccgcccacatcctcactccctcctgctgtgtccccagcacttcagcctcctctacaagaccgtccagaggctgctcgtgaaggccaagacacagtgacacagccacccccacagccggagcccccgccgctccacagtccctggggccgagcacgagtgagtggacactgccccgccgcgggcggccctgcagggacaggggccctctccctccccggcggtggttggaacactgaattacagagcttttttctgttgctctccgagactggggggggattgtttcttcttttccttgtctttgaacttccttggaggagagcttgggagacgtcccggggccaggctacggacttgcggacgagccccccagtcctgggagccggccgccctcggtctggtgtaagcacacatgcacgattaaagaggagacgccgggaccccctgcccgatcgcgcgcggcctccgcccaccgcctcctgccgcaaggggcctggactgcaggcctgacctgctccctgctccgtgtctgtcctaggacgtcccctcccgctccccgatggtggcgtggacatggttatttatctctgctccttcttgcctggaggagggcagtgccagccctggggttctgggattccagccctcctggagccttttgttccccatgtggtctcagtgacccgtccccctgacagtgggctcggggagctgcatcacccagccttccccttctccgactgcagggtctgatgtcatcattgacagcctttgcttcgtgggggcctggcagggcccctgcctccccgacccccgacccactgcaaatccccgttcccctgcactcctcttctcccagcccatccctccggcccctgtgcctctgcggccccagcccagctcccagggccgtcacctgcttggccctggcccagctccctgccctgagtcctgagccagtgcctggtgtttcctgggctcggtactgggcccccaggccatccaggctttgccacggccagttggtcctccctggggaactgggtgcgggtggagtactgggaggcaggaggtggcccggggaggccttgtggctcctcccctcgctcctcgccctgggcctcagcttcctcatcaatagaaaggatgtgttcggggtgggggcgtcaggtgagaacgtttgctgggaaggagaggacttggggcatggcctctggggccacccttcctggaactcagagaggaaggtccgggccctcgggaagccttggacagaaccctccaccccgcagaccaggcgtcgtgtgtgtgtgggagagaaggaggcccgtgttgagctcagggagaccccggtgtgtccgttctttagcaatataacctacccagtgcgtgccgagcaggcttggtggggaagggacttgagctgggcaagtcctggcctggcacccgcagccgtctcccttccgtggcccagggaggtgtttgctgtccgaaggacctgggccggcccatgggagcctggggttctgtccagataggaccagggggtctcactttggccaccagttcttcggccagcacctctgccctccagaacctgcagcctggaggggtgaggggacaaccacccctctttcctccaggttggcaggggaccctcttctcccgtctgccctgcgggttgcccgcctcctccagagacttgcccaagggcccatcaccactggcctctgggcacttgtgctgagactctgggacccaggcagctgccaccttgtcaccatgagagaatttggggagtgcttgcatgctagccagcaggctcctgtctgggtgccacggggccagcattttggagggagcttccttccttccttcctggacaggtcgtcatgatggatgcactgactgaccgtctggggctcaggctggtgtgggatgcagccggccgatgagaaaataaagccatattgaatgatcgccaccagtgtttggtctgggggctgtgagaattggattgtgacaactgttgggggttcatgttcctccagggggtgacagtaggggcagggctgtgtggagagtacgtcactgacttgccctctgctggagtgaggctccagcctatcgtgggccaggcctgtgcccaaggctgctgggccgtgcaggagaggagggcctgtgtacagggtcttgtaggtgatggatggacctgtttcctgggccaccatcacaaagcaccaccaactatggggctcagaacaccagaaatccacccttagtgtctccgaagccccaagtccaaagtcagggtgttggcagggcccccagggcgggtccttcctgcctctcctcccagcttctagggctcccagcatcctcggcttgtggccgcgtcattccagcccccaccttgtccctgtcttccaaggacctccgtcacattggatcagggcccatcttgctccaggaagatgttccccctaactaatgacctctgccaagatcccatttccagttgaggctaaaggctgaggttgttttggacatgaatctgggaggactctgcaaccctggatggcgggcagtgggctgtgtgaagtcggcttccaaccccagccccaggttcagagaggtcccagcagggcaccatactcggctagctttggtttactgagaacctacacagcaggtgcagaactagggttggtccctcctggtcagaagccccggggaccctcccaggttctgcccggtgcccaggcccccttcctggcctgcccagctgtcgggctcagtaaatgctggtggagctgccatgtgtccctggcctgagatccgtgctctcggggaaggaggagaggcagagatgtgccggtgagaagaagcagggagaggtgggggcgtggggaggccagggcagctgaggaagctgccctgagggaggcagtgtcctgcagactggctggaagggagggtgtctgagctgcgacctgaatgatgaggcagccggggtgaaacctggaggagaagattgcaagcagaggcacagcccacctgtgcaaaggccctggtgcaggacggcaccgggcgtgttggaggaacagcaggaaggcctgtgtggctcgagcagagggagtgagggtggggaagggacagggcaggttgtgcagggcctggtgggccacggggaggacttgggctttgaccccagggcagctgggagccatggagggctgtgggtagaagagcgacaggccctgactcaggtgctcccaggcgccctctgacggctaccgcagggaggacagacgggagtggcgagggtttagcctaggaccgggtagaggtgactgggctggcacaagtggaggcagagaaggatgggctcatcctgttccccctccaccgctgtgttcctggagtgcagaggaggggctacagagatgcttccagaaccagtgtgtggcctggaccaagacctggactgctgggggcttcctgagcaagacccacatccctgcagtcaaagctgcctcttctcagaccagggaacttcagaaacaggcagggaacccacccccccaccagggtcccctaggaatcggcaacagagcctcaaacccagcacggggtctctgcctccccaaaacatgtggcaggagaagcttgttcaggagggagaggagggaggggatggacccagagcgaaaggcaggcagggcagggttgcaggaaaagaaagaggctcacctgactccggagcatggggccgctggccactggggatggaatggcgggggcagtgcttacctgaccccggagcatggggccgctggccactggggatggaatggtgggggcagtgcttgggcttccctgggcggcgagcagaggccaggttcggcccccacgtgctgtgtggccctggggcatgggggctgtgcctccctggaccaaattttaccagttcagggggctctagggtccaggggtttgaccttcttggggtcctgcgtgattctccaggagcttagcagggccaagagtggacagtggctgcccacctctgtgcaggcagaaggtggctttggccccatcgtggacccaggcaaaccccattttagaggaaaagccagcccatcatcttccctgctaacatacacaggtaatttttcctttttttttttttttttagagacagggtctcacacccggcatggtggcttcacgtctgtaatcccagcactctgggagtcagaggcaggaggatcacttgaggtcagagtttgagaccagcctggccaacatgatgaaaacccgtctctgctaaaaatataaaaattagccgggggtggtggtacacatctgtagtcccagctactcgggaggccgaggcagaagaatccattgaacctgggaagcggaggttgcagtgagccaagatcatgccactgcactgcagcctgggcgacagagcgagactttgactcaaaaaacataaaatagggtcttgctctgtcacccaggctggagtgcagtggtgcaatcatagctcactgcagccttgacctgggctcaagtgatcctcctgccacagcctcccaagtagctgggactgcaggcaaatgccaccatgcccggctacattttgtaaatatttttgtagagattggatcttgccatgttgcccaggctggtcttgaactcctggcctcaagcaatcctctcacttcagcctctgaacgcactaggaatacaggcatgaaccactgtgcccggccggattagtttcattcaactatcgattcagcgaacacttgaactctgctctgccaggtcctgtgccaggctcagggatacaggcgtgtgcaagagacgctggcctggacgccatggggctcgcagtccactgtgggagttggataataagtggtcaagtaggtgggctgccttcagatggtgatcaatggctgggtgctgttttacaattgagtccacactggaggctccctgaggagggactttgaggttttgttttgtttgcttgtttgtttttttgagacagtcttgctctgtcacccaggctggagtgtagaggccctatcttgactcacggcaaccttcgtctcctgggtccaagcgattctcctgctgcagcctccctgagtagctgggactagagaggtatgccaccaaattttgtatttttagtagaaatcaggttttggcatattggccaggctgaccttgaactcctaacctcaggagatctgcccgcctcggcctcccgaagtgccgggactacaggtgtgacaccacgcccggcctgtttgagtttgactctgtcacccgggctggagtgcagtgatgtgttctcggctcactgcaacttccttctcctgggttcaagcaattctcatgcctcagcctcctgagtaactgggactacaggcacctggctaaatttttttatttttagtagagacagggtttcaccatgttggccaggcttgcctcaaactcctgacctccggtgattccccgtcgcagcctcccaaagtgttgggtttatgggcgtgagccactgcgcccggcctggagggggcttttgagtgaaattggaatgacaaggattattacatcatgtggaaatgtggggacagtggttaaggcagtgagcacagccggtgcaaaggccctggggcaggatcgcgcctggtgtgttggaggaacagtgaggaggcccatgtggctggagcagagtgagctgggggagagagtgaggcaggagagagagggaggagggggagaaaggaaggggagagggaggagggagagggaggaagcagggaggtttcaggccatgcagggcctcctgggggaaggggagggtaaggagagcagaaatggtgtctgaccttcactgaatctggaaaggtcaccggcagccagaggacagttatgaaaatgaaacgaggccgggcgctggggctcacacctgtaatcccagcactttgggaagccaaggcaggcggatcacaaggtcaagagatggagaccaacctggccaacatggtgaagccccgtctctactaaaaatacaaaaattagccgggcgtggtagcacgcacctgtagtcccagctactcgggaggctgaggcaggagaatcctgtgaacccaggaggcggaggttgcagtgagcttagatcgtgccgttgcaccccagcctgggcgacagagcatgactctgtctcaaaaaaaaaaaaagaaaggaaatgacatcgagctgcccgtgttgggcacatgtgaggcctctttccggggctccctcggtgccctcaggcctcaccttagccccggtcaaccctgggcagcagtgaacgaggaagacaaagacgtccccccagcaagggtattgtactacctcccagaggccaggtccaggggccatgatctcttcctggaggccttttaagttgataaaacatcagctaatgtcccttgaaaccagcacagtttctctccagaggtgctgtccactctatgcatctttctcattttttatattttttgtagagatggagtcttgctatttgcacaggctggcctctgtctcctggcctcaagtgatgctcccgcctcagcctctcaaagctgtgggaatacaggtgtgagccaccgcgcctgggcccctgggtagatgctttttttttttttttttgcttttttttttgagacggagtttcgcttttgctgcccaggctggagtgcagtggcacgatctcagctcactgcaacctccacctcccaggttcaagtgattttcctgcctcagcctcccgagtagctgggattacaggcacccgccaccatgcctggctaatttttttatttttatttatttgtttatttattgagatggagtcttgctgtgtcacccaggctggcatgcagtggcacaatctcggctcactgcaacctctgcctcctgggttcaagtgtttctccggcctcagcctcctgagtagctgggattacaggtgcgtgccaccacacccagctaatttttgtatttgtagtagagacagggtttcaccgtgttggtcaggctggtcttgaactcctgaccccgtgatccacctgcctcagcctcccaacgtgctgggattacaggcgtgagccactgaacctggccaatttttgttatttttagtagagatggggtttcgccatgttggccaggctggtctcaaactcctgacctcaggtgatccacctgcttcggcctcccaaagtgccgggattacctgtgtgagccaccgcgcccagacttgggtaattgcttttcagatgctcatgttacagatggtaacatggaggccgagcacaaggggttcagacgtggattggacgaatctgagggccacgccattagccacatactgagtggagtgggcgaaaagggcccaggtttaggtcaccgggataaccagtgtccagagatggacggcacttacctgaggccacagagcaggtgaggatgagccccagcgggagcgagtagccagggagccggcctgcctcctgggctggggagaagacactggaagagcctggagaccgcccagcctccctgattccacgctagacatttaattctttctttttcttttgagacagagtctcgccctgtcacgcaggctggaatgcagtggcgtgatcttggctcactgcagccaccgcctcctgggttcaagtgattctcctgcctcaacctcccgagtagctggaatttgcaggtgcccgccaccatgcttggctaattttttttttttttcagccagtggtgtaaattttcctttaagagatagtaaggtgttttctgtcacccaggccggtgtatagtggcgcaatcatggctcactgcaacctagacctcccaggctcaagcgaccctcccacctcggcctcccaagtagctgggactgctggtatgtgccaccgcgcccggcttatttttgtatttttgtaattttgtagagatagggtttctctttgttgcgcaggctggtctggaactcgtgggctccagcgattctcctgccttggtctcccaaagtagtgggattacaggcgtgagccaccacgccagccacctggtcaaatgaagctttttttttttttttctgagacggagtctggctctgtcgcccaggttggagtgcagtggcacgatctcggctcactgcaagctccgcctcccgggttcacgccactctgctgcctcagcctcccgagtagctgggactacaggtgcccgccaccacgcctggctaattttttgtacttttagtagagatggggtttcaccgtgttagccaggatggtctccatctcctgacctcgtgatccgcccgcctcggcctcccaaagtgctgggattacaggcgtgagccaccgcgcccggccgcaaattaagcatttttaaaagagctgattgatatcaaggaaaacatcaaatagtactggtgcccctcacacccattaggatggctaccattaaaaaaaaaaaagcgtgttttcccagcactttgggaggccgaggcaggtgaatcacttgaggtcaggagttcaagaccagcctgaccaacatggtgaaaccccatctctgctaaaaatacaaaaattagccaggcgtggccgggcgcggtggctcacacctgtaatcccagcgctttgagaggctgaggcgagcggatcacgaggtcaggagatcgagaccatcctggctaacacagtgaaaccccgtctctactaaaaatacaaaaaattagcccagcgtggtggcaggtgcctgtagtcccagctactcgggaggctgaggcaggagaatggcgtgaactcgggaagcagagcttgcagtgagccaagatcgctgcaactgcactccaggctgggtgacagagtgagactccgtctctctaaaaaaaaaaaaaaaaaaaaaaaaagccaggtgtggtagtatgcacctataattccagttactcgagaggctgaggcaggaaaatcacttgaacccaggaggtggaggttgcagtgagccaagatcgtgacactatactccagcctgggtgacagagcaagtctctatctcaaaaaaaaaaaaaagaaatttaaaaatagaattgccataagagccagcattcccactcctgggtatattcccagcaaaacggaaggcatgagctgcatcctgcaaaattccaggtgccttgacttgccccctcagagaaatggggatgagagttcctgctgggtgtatggcagacaccgtgaacagtgtcaccgtgaacagggacacagagatatttgtacacccatgttcacagcagcacaattcacaataaccccaaaggtggaaacaacccaaggggtggtggacagaaaaatggatcaacacactgtggtccatccacacagtggaatattactcagccatgaaaaggaagggaatcctgacgcaggctacagtgcggaggcatcttgaggacctcaggctcagtgagagaagccagacacagagggacaaatgccgtgtgattccactcctaggaagtccctggagtcatcaaattcacagagacagaaagtaggatggggatgccaggggctggggagggagatggggagtgagtgtttcatagactcaaagagtttcagtttgggaagataaagttctggagagggtggaggtgatggttgcacagccacgtgaatgtgtttttaacgctgctgaactgtgcacttagaagtaggtcacgctgggcacagtgactcacgcctgtaatcccagcacttcgggaggccaagacgggtggatcacctgaggtcaggagttcgagaccagcctggccgacatggcgaaaccccgtctctactaagaacacaaaaattagccaggcatggtggcgggcacctgtaatcccagctacttgggaggctgaggcaagaattgcttgaacctgggaggtggaggttgcggtgagctgagatcacgccactgcactccaacctgggtgacagagcgagactgtctcaaaaaaaaaaaagaaaaaaaaaaaagaaaccgggtgcagtggcttatccttgtaatcccggcactttgggaggctgaggcaggcagactgcttgagttcaggagttcaaaaccagcctaagcaacatagcaagaccccatctctacaaaaaataaaagaattcgctggcattgtggctcgagcctgtgtcccagctactcgggaggctgaggtgggaggatcacttgagcccgggaagttgagatttcagtgagctatgattgaaccactgcactccagcctgggcaacaaagcgagaccttgtctcaaaagaataaaatacaaaatggttaagtgtattattttgttatgtgtattttatcactgtttaaaaaaaaaaaaaaaaataagccaggcgtggtggcttacgcctgttatcccattactttgggaggctgaagtgggtgattatctgaggtcaggagtttgagatcagcctggccaatgtggtgaaacctcgtctctactaaaaatacaaaaattagccagtcatggtgacgcacgcctgttgtcccaactactgaggaggctgaagcgggagaatcgcttgaatccaggaggcggaggttgcagtgagccgagatcgcactgctgcactccagcctgagtgacacagcgggactccgtctcaaaaagaaatagataaatagcccctggagcccacagctctggcaaaatccatgaaggtggaaaacatgagctgcatcctgtgaagttctgggtgcctcgacttgcccctctgagaaatggggatgacaggtcctgctgtgtgcacggaggacaccgtgcctggtacgtggcagataaatagtcagtgtcaccctgagctggacgggcctgggggcctgggagggggtccgtgtgctggccggcaaggcagagacgccttgacgccgcatggcgtgggtttgagaccaggcagccggtgagcccagttggctttgggaagctctgaattcctttgagcaccgaagagaaaagaataagctgtgttggcttcgatacccaaatcctccatctgacagccgtgactgctaaatcggctctgcttcccttcctgttttcaagttttagactttctcgattccaaagtgattcacggtcgtcgtgggaagacgagaaaaattcaaaagaagaagaaagaaagaccgggcgcggcggctcacgcctgtaatcccagcactttgggaggccgaggcgggtggatcacgaggtcaggagatcgagaccatcctggctgacacggtgaaaccccgtctctactaaaaatacaaaaaattagccgggcgtggtggcgggcgcctgtagtcccagctactcgggaggctgaggcaggagcatggcgtgaaccccggaggcggaggttgcagtgagccgagattgtgccactgcactccagcctgggcaacagagcgagactccgtctcaaaaaaagaaaaaaaaaaaagaaaaacctaaggaggccaaggaggaggaagaagaacaaaaggcttgcagattccttttttttgtttgtttgttttttgttttgagacggagtctcgctctgtggcccaggctggagtgcggtggctccatctcagctcactgcaagctccgcctcccagttcaagcgattctcctgcctcagcctcctgagtagctgggatcacaggcacccgccaccacgcccagctaatttttgtatttttagtggagacagggttttaccatgttggccaggctcatctcaaactcccgacctcaggtgatctgcccgcctcggcctcccaaagtgctgggattacaggtgtgagtcgccgcgccctgccactcccacgcgctttacttcctcagtaacatccatggcacgggcatcctgcagtgaccgatgcccaccagactgcatccgctaacaagacagggagaccggcctgtggtacccagatgtgcccaagctcacagcctcactattctccgtgctcacagcctcgctattctccaggctcacagcctcgctattctccaggctcacagcctcgctattctccgtgctcacccacccccttagctgtgccacggatgaaattcaggaggcagaatgctgggtttaagtgctcagaagtcagacccgaattcggttgggctcttgttttgggtggaagaaagaggaggaagaggctgaaaaaagtgcatctttggctcataggagtttgtgagtttctcttttgattttgttttcttttgagacagagttttgctcttgttgcccagggtggagtgcgatggtacagtcttggcttactgtagcctggacctccctgggctgaagcgatcctcccacctcagcctcccaagtagctggaaccacaggtgcctgccaccacacccggctaatttttgtattttttgtagagatggagtcttgctatgttacagctcaggctagtgtggaactcccgggctcaagcagtcctcccagctcggcctcccaaagtgctgggattacaggcatgatttttcttttttttttgagacggagtctcgctctgttgcccaggctggagtgcggtggcgcgatcttggctcactgcaaactccgcctcccgggttcaagcaattctcctgcctcagcctcctgagtagctgggactactggcacacaccaccacgcccaactttttgtaatttcagtagggatggggttttgccatgttggccaagatggtctcaatctcttgccctcatgatgtgcctgcctcggcctcccaaggtgctaggattacaggtatgagccaccacacccggccaaattttagacacggggtttcaccatgttggccaggctggtctcgaactcctgacctcaagtgatccacttgccttggcttcccaaagtgctgggattacaggcgtgagccactgcgcccggccaggcgtgatttttaaaattcttattaaggactctcccagaacaccagaggctcacggggctctgagcatcctgcttgagtctccatggagacgaagcctatgtctcctggccgactccaccagccccagtgccacgctgtgcccggccaagcctcagctgagtctaagcacctgcgtctgtgctgggccgagtggcaggatgttgtgggagaacccctgaccccttgcccagctctgctcgtcacccagttctgatgttctgttccatctgggggtggccaggaggctgccagtaacagcaatgatgaatagccattcactgagctaagctcccagacactctgctaagcccacattttagttcatgagtccacaccagaccagggccttcaccatatcctctttttctttttctttttttttttttgagatggcgtctcacttggtcgttcaggctggcgtgcagtggtgcgatctcggctcactgcaacctccacctcccaggttcaggcgattctgcctcagcctcccaagtagctgggattacaggtgcatgccaccacgcccggctaattgtgtatttttagtagagatggggttttgccacgctggccaggatggtctcgaactcctgacctcagatcatctgccagccttggcctccccaagtgctgggattacaggtgtgagtcaccgtgcccggtccctctcctctctctttagtcctgcttggcaaataaggaaactggggctcagctgcctgatgtgtggggagatggtatgggatggtgggaagtgtgtgtgctccagagtctggcttcctgggtttacatcccagctctcttaccgtgtggtcttgcaccagccactggagctctctgggcctcagttccccctctaacgcgggtggacatttcatacaaatggcgtcacacgctgtgtggtcttctgtgtttgacatctttcaccaagcatgatgtgctcaaggtatggcttgggtcagagcctcattttttttttcatggctgagtcgtgttccattggctggatggagcacaaaatgtcctctaaagccaggcatggtggctcacacttgtcatcccagcactttgagaggctgaggcgggaggattgcttgagcccagaagtttgcgtacagcctggacaacatagcaagactccatttctacaaaaaatttaaaaattagccaggcatggtggcatggacatctgtggtcccagctactctggaggctgaggcaggaggatcgcttgagcccaagaggtcaaggctgcagcaagctatgatcatgccactgcactccagcctgggtgacagagcgataccctgccttataaataaataaataaataaaattgtaaattagccaggtgtggtggtgggagcctgtaatcccagctactcaggaggctgaggcatgagaatcacttgaacccaggaggtggaagttgcagtgagccgagattgcaccactgcactccagcctgggcgacagcaagagcctgtctcaaaaaataaataaaataagaattaaaaattaaattttaggctgggcgcagtagctcatgcctgtaatcccagcactttgggaggctgaggtgggcagatcacctaaggtcaggagttcgacaccagcctggccaacatggtgaaacccatctctactaaaaatacaaaaattagccaggtgtggtggcacatgcctgtaatcccagctacactggagactgagacaggagaattgcttgaacccgggaggcagaggttgcagtgagccgagataatgccactgcactccagcctgggtgacacagcgagactctgtctcaataataaataaataaataaataagtacgttaataaaattttacactatttgggtgtggtggggtgcaactgtaatcccagctactcaggtggctgaggcaggagaatcatttgaacctggtaggtggaggttgcagtaagccaagatcacaccattgcacttcagcctgggcgacagagagagactccatctcgaaaaaaataaaaataaaaatgaaaataaaattttaaatgggtgtaactctgtggagggaaaaagaaggctgagaaaggagataatggtgactgagcggttttagataaggtagatggggaaagtgatggggaattaaggaatgagccacacatcatctggggagagcacatcccagacaaagggtacagcccgtgcaaaggccctgaggcaggaccgcacctgacaagtgagaggaacagcgaggaggcctgtgtagctgcagcagtgaggagggggagagagggagcaggggaaggtggggacaaggcagaacaggacacgcagagccttgtgggcctcaagaaggacttgggctttaattatgggacatctttgggaagtgttttttttttttttttttttgagacaagatttcattctgtcgcctagaccagaggcagtggtgcgatcctggttcactgcagctttaatatcccagggatcaaccgatgctcccaccgcagcctccgagtagctgggaccaacggtgcacaccaaccactcctggctgatttttttttttttttttctcaaacagagtttcactcttgttgcccaggctggagtgcaatggcgcaatctcggctcactgcaatctccgcctcccgggttcaagcgattttcctgcctcagcctcctgagtagctgggattacaggcatgcacaaccatgcctggctaatttttgtgtttttagtagagacagagttttctccatgttgatcaggctggtctcgaactcctgatctcaggtgatccacctgcctcagcctcccaaagtgctgggattacaggtgtgagccatcgtgcctggcctgttttcttattttttacagcaatggcgtctcactatgttgctcaggctggtctccaactcctgggctcaagtggtcctcctgactctgcttctcaaagtgctgggattacaggtgtgagccaccacggccagcacgtattattatttttattaatattattgatgagtttcatacgtaaaggatcacgggcactttagagctgggagatacttcagtatttctcctatcctgtcattatcagtgcgagccagtctccctccttgttgatgacattattgatgagttacatacttaaagggccaaggacactttctatgtgtaagcaccctatagaactggaagatacttttaccatttctcctgtgctgtcgtgattagtgggagcactttgtcttgctcttgattaattattattagtgttgttattattaggtgttttttttttttttttttaccaagacggagttttgctcttgttgcccaggctggagtacaatggcacaatcttggctcactgcaacctccgcctcctgggttcaagtgattatcctgcctcagcctcccgagtagctgggattacaggcaccccccgccaccgagcccagctaatttttgtattctttagtagagacggggtttcaccgtgttagccagtctggtctcgaactcctgacctcaagtgatccacccacctcggcctcccaaagtgctgagatgacaggcgtgagccaccgcgcccagccatattattagtgttattaatattattgatgagttacctactttaaggatcacgggcgctttcaacgacaagccccctacattatcccagcaacttttgacattcttccggccgatgccctccgcgggagccggcggggacccctgggaagccggctaaggcccgtcccgcccgcagctccgccctcgcccacccgtaggcggggcccggggccttccggcctcagtttccccccgcggcccggggatgcggggaggcgccggctgccccgcgcggcgcggccgccaggggccgctgcggagccgcctttgtggtcccgatgccggggcgggcgcgggcgggaggagggcgcgggggcccgggagggaggcgggaggcgcggccgccgctccagctgcgagtccgcccgccgcccgccgccgccgccgccggctcggtcccgcgcccgccatggcccgcctgacggagagcgaggcgcgccggcagcagcagcagctcctgcagccgcggccctcgcccgtgggcagcagcgggcccgagccccccggggggcagcccgacggcatgaaggacctggacgccatcaaactcttcgtgggccagatcccgcggcacctggacgagaaggacctcaagccgctcttcgagcagttcggccgcatctacgagctcacggtgctcaaagacccctacacggggatgcacaaaggtgggcgcccggccccctcccccctctccccctccctccgcctcccaccccaccttccggcatcttctctcccccatcaccatccctcctctgctcacctccctcctctgcctgcctctgccggagcatcggttcttaccccctccctcccacccacccctcctcccctctctgggggtgcagctgacagatccgagcgggccccctcccctcctccgccccctctccctccctccccaccttccggcatctcctctctctctccctctctctctccctctctctctccctttctcttctctcccatctccctcgacctctcatccttccccccacagcaccctctctctccctccctccctccctcacccttccatcccccagacccccaccccttcctccctccctcaccccactctttcctgcccgtttgccaggggagcctcgggaacgccggcacccctccctgcccccccacccccattcattcagcctccccaggccccgtcggggaagtttgcacctgcggactccattgctttggttattttcacaaagccaggccggcggggcaggtccggccgcgggggacacggatgcccaggaccccaggctaatcggtaactacaaaggaagacgggttgggggcgcccggctcggggggacgcgcccgcctcgcctgcctcgggtggcggagaggctcccgtcgctgcccaccccctggccccaccacctccgcgtggatcagcattctctcctccatttctctgccctccccctcccccgcctccaccttgggctcaagttgaaactggccgagcctcttagcaatgtgttggggtctcaggcccaagacaatgagcttggacgtgtccatctgggcagagcccaaattctggggtggacagggaggaggagggaggcgtgggcggcctcaggcctgtctgcctccctcccactggattctccctccgatggcatcccgggtgggggtgtccggcaattgtatccccagcccttggttcccatcatgggcccagcgtctgaattggggtggctttgacagccttccggtcaggtgttggggactgggggtgccacttcaaaggccttgtgctggacacccccggccctccccctcccatcctccaggaagaccctggagaggccttggggaaggaccggggcccatgacctattttacacccactttttccccagcgctgcgtgcccggtaagcatgaatgcatgtttattgaatgaatgaattgaatgaatgaatgaatgaatgaatgaatgaatgaaggggttcaagaaggccctagggagggtctggtgagatggggcccaggcctgtcacttcagctagaccctccagctggttatcttgagggaggaaagaaacccctccccattccccatctcttttcaaaaccaaccatcacacacacacacacacacacacacacacacacacaaaattgggcctgaaaaatctaactcctccatgtggcctaggagggcagaggggctcccatgcggcccccataagtcaatatctggagtccagaggtgataggtgggcttttcccacacgcccccacccctgggtacacccaaagcacccatttctagaaagattcccgtgggaatgggggagtccacatggccccccaaacggttgcattgaaaggccgctggttgagctctaggtcggagagacaggtgggggtgcagggactggagcatcctggtgactcttcttcatctttttttttttttccttcttatttttaaatctctgggaaacctgggcacgggagaagtgaggggtgaaggaggggctggggctgggttttcacctggccctgagcctcagtttccctgctgtcaacagagcaggaccatgacgcatccccagttctttttttacaggttggagaatgttggggtccctggggtacctcgggggtatttcccatttgcgggctttccttggagggtgagaattgagaagccgtgtgcacgacagccggcaatcaccctccactttttaggggtcccaggtccgtctgtgtgtgagatacaggggcttcacctcgtgtcgaaaatgggtccagtaccctcggggaagtgaatccccacctgcgtggggcctggctggacttcacctggtctttgcctgcaggtgcttggcacgaaggggtgggggggtgtcttcagaatcagcatctgtgatccaggtttgcgtttggggctcagctgtgtgacttctggctagtgactgcccctctctgggccctctctgggccttggctgaagggaggtggaatggtgaatgggaagtcaggatttttggggagaggagtgagttcagacacctgccaccaacatgaccttattagggctgtttctgggagccctggcgtggtttagtgtgcctgttcagagtggcagggccttggggatatggaccccaggcctggagagaaatccctttccctggatgcccggcggggcccatgagactgggcacaggagatctgtaaggagtagagtggggtgggatgagaacaccctggaggtgcacccggctcctggtacaagcccggagggggtcagctggtaccacctctagcccttccttggtgtccaggctgcagggacttgtttgatttccccatggaacccatcgccatggaggtgggctccgagtgacagcgcatttctgggaaactgagggcttgagagacataccctgggtcccacatttaccggagctaggcccccattaccccccctgccttcctcccaggccaggagaagcagctgtgcctgtatctgtgtgacataggggtgacaggttccccaaagccaagagtgaggcccccagagatggtgctggggatggaggggcccgtgacacctgacagccacagctggcctggccgaaggtggcgtgggggcagccagattcctagaggccgtgctgagactcagagaaaggcaggaggcctcatccaggagcggggcaggggtagggggagagggatgcgtcgaggtggtcttccgaaagagggcaggccctggggcgctgggtttgtttttaagagagagagagagagagagatgaggacacagagagagagagagagacacgcagggaaagagagacagagagacccacagagagacagagacagagaaacacagacagggagggggctgcagagagatgcaggcccacaggaagaccacaagcctgctcctgccagaactccgcatccagagagcggggacctcccccaggaaggacccccaccccaggccaggggctcaggccaagaactggaggctgggattggggctcccgctggcccccctgcagttcctgccccggggaccctccctccaaggcaggcacctctggagctgtggctgcccctgtctatggatggtggctgcctgggtgcccaccctgccaggggaaggtgcccacggtggtactggtccgccgctgccactgggccccccgtttatggtaatcgcatatacatttgcatgttaatgacaatatttgtcttaaagcggaggttgcgctgggggacggtgcaggtggggggggggcccggcgggggcccgggtgggggcccgcggtttccatgggagcaccagctgccggctcgactcgggagggggggaggaggaggctgtagcaggctgagctctgaggcgtgagattccgcgtgtgacgcaccagctccagggagaaggcgggctgggcggcctggcggggggaccgcgggagcagttggcacccctggtggtggcggggacagcggcagggggctgggggtggctggcagggttggccggcgtgtgtgtgtgtgtgtgtgtgtgtgtgtgtgtgtgtgtgtacgcgggcgcgcgcctgggaaggactcctgccggggtgctgtgtggcttcaagctgagcgcgcccctctctgtgcctcgttttcccctgctgcatattctctcctttatttaacagactttcataaggccccggagcctcacacctgtgactgtgacatcgtttctgcacctccctccccccgccccccgcttcaggcaaagagcatttattgaacgcctactgttttccagcatttatgcagagctgggcatttggtgtgaacagaattccttgtaggattcatgatggagtgggctagatgttaatccgtccacctgtatgaccaacatttattgagagcttgctgtgtaccaggccctgttctagaccctgggctactgggttgggcaaaacaaataaaatctgccatccctaccccccatccagacctcccctcccaccagattccagtttaggggacggagacagctggggaactgggcttacaaggcaccgagctcaggaatatgatggcaaaacacacaccagcagtgacagcccagaggggggccctgcccccgcaggagtggaggccaggagggccgcctggaggaggcagttagtgtaggagagtcgttgagagcttggagatgagatgagtctggtttccctgcgtcttgtggccttgggcagatgtcttcatccctccaggctgcagtgggtcttcccgtttcagaggaaatgagggaggtgagagcagaagtggcagggagagcagagaacagaagaggctgttggcatggggccgggcacagagtatgtgcttggtcagtgggagcgggcttgttacatgactacgctgaggcccgaagcgtgaggaggatgcactgacggggaaaggtgttcctgacaatgtgcgagggcccagaggggcgctaactccagggaagctcaggtgcagggaggatggagtttttgccctggtaggaaaggagcagaggggcttgggagctcagggtccccttcttctatggggctcacctgttgaggctcttccgaggggtcttagcttggggctggacccgggaggttatctctgaagtgggcttgtgtctctctctttcacccctcaaattggcaagtgaggccttggccattggaaacacctggtaggaccacactcattcattcattcattcattcattcattcattcattcacacaacacttcttgaaaaccttctgtggccttacctcgtactgagcaagaggggtctgaggccagagctagacattggcacctatagtccagtggtctggcttgggtcagagggaggggtgcagggttgagggaactggataatgaagcaggagctctgcctggaggaggggcattagaaatggggctttgaaggatcgacaggagctttccaggtggagaaagcattttatttatgcattcacagaaacacttactgtgttccaggccctatgatgggcatgaaacacagcagtgaacaagataggtacatgtcttgacttcctggatatagggagagggaactggatctatgaaggcctggaggcatgaagaatttgcacagctagggtagaggacggattaggtgaggcgtgggagatgaggctggagagtcagcatgggctggaccaggaaagcctctgatgctggactgagcttggactctttcctgagggcactggggagccatggaagagtttagagcagggaggaactcaggcagacctgcatgggaagcgggcttcacatcctgttaactcccattgccaccaccagcctcttcccagcctcccagccttgctcaaaatatgctcgtttccttcacacctggatggacaaaatagaagcttccagttggggtgaggcccacagtgtgggaagagagaaatacaaagaagcagatgtgtgttccgattacattggctcttagagaaccaagttcccctcctccatgtgaagcacaggaggagatcggagcccagagaggggcaacacccagcccaagtcatacagcagtacagctgggcttcacgcctcccagcctgagctttgacccgctctggaaggataaaaagaaacatgattttggaaacatagaccagggtcagagccatccagggaggctggctgtccttgaacttaagatgatcagggccaaagggaagggctgttaggtttggaagacactggcctagcaggagtccagttggtctggagtcatagtcaacatcagtgatatgtaagctctaggagggcagaaattgtgtcttgtttgccatttggaagtgagcttgtggatgaacaagggcatgaggaaatgagacgatctggggattggagaatggatgggctggctaacagatggatggagagatagatatgtgaatcaatggatacagacatggatggatggatgaatgggtgacagtgactctagatatgagtggatttgatggatagaaaagtgggtagatcagtggaaggtttgaatggattgatggatgggtgaacggatggatggatggatggatggatggatggatggatggatggatgggtggatgaatggatttatggatggatgggtggatgagtagtggatggatggatttgtagatgggtgggtggatggatggatggatttgtagatgggtgggtggatggatggatggatggatagatggatggatggtagatgggtggatggatggatggatggattggtgggtgaatggatgagcaggtgggtggatggatggatggatgggcggatgaatagattggtggatgatgggggagcgatggatgggcatatggatgggtgggtgggtgggttggtgggtcaatgagtgcatggatggatggatgggtaggtgggtggatagatgagtggatggatggatggatggatgcatgaatgaatgagtgaatgagtgaatgaatagatggatggatgatgggtagatggagaaattaatggttggatggatggatgaaaagatggatgggtaattggtggatggaatactagatagatgggtgggtgcatggatgaatggatggatggatgatggatagaagatgggatagactgaaggatggaaggatgcttcctcaacctttactaccttcctcctcacctggtgaatacgaatgttcagaacctttgctctcagacaggcttggttccaatcctggctccatttttaaatttctgtgtaatcctgaaaaagtcacctcatcttttctgaaccttagctactttgtaaaagagaagtaatacaggtagctagttcacagagcagttgtcaaaattggaactaatttatatgatgtggccaggcgtggtagctcacacctgtaatcccattgctttgggaggttgaggtgggaggatcccttgagcccaggagttcaagaccagcctgagcaacacagctctacaaaaaataaaaaccatatccaggtgtggtggtgtgcaactgtagtcccagccactcaggaggctgaggagggaggattgcttgatcacaggagttagagattacagtgaactatgatcgcaccactgcatcccagcctgcgtgatagagtgaggccctttacagagtgagtctgtaaagaaaaaaaaaaatgtggtgtgattcatgtaattaacctgaataatgacttgcatattgtaggtgttctccataaatggtcaggcagtcaaaatagtcaacaggctggctgcagtgcatcacgcctgtaatcccagcactttgggaggctgaggtgggaggattgcttgagcccaggagttccagaccagcctgggcaacatagcaagaccccttctctacaaaaaataaatttaggctgggcgtggtggctcacgcctataatcccagcactttgggaggccgaggtgggtggatcaccagaggtcgggagttcgagaccagcctgaccaacatggagaaaccccatctctgctaaaaatacaaaattagccgggtgtggtggtgcatgtctgtaatcccagctactcgggaggctgaggcaagagaatcgcttgaacccgggaggcagaggttgtggtgagctgagatcatgccattgcactccagcctgggcaacaagagtgaaactccgtctcaaaaaaaataaaaattaaaattaaaaataaataaataaataaataaataaataagtttttaaaaaagctgcacgtggtggcatgtgcctagagccctagctgcttgggaggctgaggtgcgaggatggcttgagcctggggaggtggaggctacagtgagccatgattatgccactgcactccaatctggaaaacagatctaaaccctgtctcaaaattcaaaaggcaacaactttattaagtctgtattgtgtgccagccattgagcgaggcttgaggacataaagcaattcagggggtaggagagactgacgataaactaggaaacaaataaagttgagataggtgtgaggtgagctgctgtgaacaaacaaactaaagatgtgtgttgggagatgacagctttccttgggggccagagatggcctttctaggaggtgacgtttgagacgagacctgaatgacagatgggaaggctgttatgctacaaccaagggaaaggcgttccaggaagagtgcagaggccctgaggcaggaccaccacatctggtgtgttggaggaacagcaaggaggcccttgtggctggagcagagtgaggagggggagagagggaggagaagagggcagagagggagtcgcgcaggttgttgagcgggttctgtgtgtcttggaaggactttggtttttaccccaagagaggtggagccatggagacctgtggcaggggagggacagggtctctcaggggaatatggacaatgtggattctgggtcctccattttttagatggggaaactaaggcacagaaggccctagaatgtgtcaggaagttctgccactaggcttatgcctggctcttctgaggagctcctgaagacggcggcgcctggaggtagctggaagacagagtggagcaggcccctcagtgccctcccattctcccagcagcctttgagggtggggtctttatatccaagaggatttgcattcttgtccctgaccctccactagggggaaggaccagagggcatgcctctagcagagctaggagccaccagaagaactttgtacacatagggaaatggaggcccaggtagaggaggggaggtcaattcaccagctcttggcaagggaggcgaggaagaggaagggatctagtgatgtggttcgttctctctctctctctctctccctccctctttcaagagattggcatctcactatgttgctaaggctggtctcaaactcctgggctcaagcaatcttcccgccttggcctcccaaagcattgagatcgtaggtgtgagccaccgcgcccagccatgatgtggttctcaatgggagttattctaggacacttggcaatgtctggagacatttgtggttgtcatgatttgggggtgcttctggctgcgagtggtgtcgagtgggtggaggccaggaatgctgctcaataccccacagcgcccagggtgacagatgatccggccccaagcatccacggtgcagaagctgagaaaccctggtccagggtacaccagtgacctggcttgggcagttggcacacagtgcagtgtcctggggatgaggcctgaaggtacctaggacaaaacctgggaatgcccttgacttccctctctcacaacaacaaccgcacctcctatccctccatcagcagattctgatggctctgccttcaaaacctctccagaatctgcccacttctctctcctctgccttcacctggtccagccccctcatccctcacctggaccagtgcagtccctgtgcccttgtccctggctcccaccttcgcgccccacagtctgtcctccccgcagcagccaccagagagcgcctgtgagcacctgagtcaggacccgtccctcctctgcctgcagccctccgtggctcccacctcccttagagtcaaagctgaagtcctcccgtgacctgcctcatccccttcataccatcccctgccccctctctcctcctcgctccctctgttccagccacactggcctccttgctgtttctgcaacaggcaaggcgtggtcctactccaggacctttgcatgggctgtgccctctgcataaatgttcttcccccagatactcacatagctccttcctttctcttctgtaagcttcacctttttttgtgaaacccctgtgatggcaggatttgtaatctagtcactcccagaactccaagttcctttttcctcctttccttttttttttcctgtgcaaatgaagacctctaacatactatatatatcgcttttaattttatttgctttttctccttcctaatagactgtaagcctcattagcacagagattttcacctttgtgtgtactgctgtgtcaccagtgcctaaaagagtgctttgaacatcacgcgaggatagatgggtgggtgggtggatggatggatggatgaataggtgggtgggtggatgggtggatgagtggatgggtggatggatgtgtggatgggtgggtggatggatgaatgaatggatgggtggatgaataggtgggtgggtggatgggtggatgagtggatggatggatggatggatggatggatggatgtgtggatgggtggatggatggatggatggatggatgtgtggatgggtggatggatggatggatggatggatggatgtgtggatgggtggatagatggatggatggatgaatggatggatggatggatggatggatgtgtggatggatggatggatggatgaatgaatggatggatggatgaataggtgggaggatggttgattggatgatggacaagtggatgggtggacagttgggtgggtgtatggatggggaaatttctggtgtagtgatggggactgaagccgtaggagtcaagatgcctgggcgagagatctggggtctagaatgagcctcaaggaacccccatatgtcaggctgtggagaggagcaggcagcatggaggctgaggagccacagccagcagggctggacctcatttggaggcagcatggttgacatagggtccaggaggaggacaccagggcctcagcacaggaatcaaggcatttatgcgtgcattgagggacagtaaaaagggggcagagagcccgtctgtctcggttttcctagtgaagttggggagaactttgggctaggaaggtggaggaggaagtggagaggatgagcagcaaagctgagtaggtggagaagggagggtcctgtgtccttttcagtgcatgtgtggcctcgtggttcccatttggtggatgagactgtgaaggctcagagaggttaagtggctggcccaagagcacacagcagaaaggtactgagctggctttgatccttatctccaatcactagattacagaactgagttaaagactaagaacttggagacccctgccatgcagggggttcgggatcaaaggggttgagatgggaggggggttcctggctggggagagaagaagaggatgaacagcaatgtattccctgtctctgtttccccaccaccatcggtgcatcgtaggtgctcaggaatattgaatgactctgagctaggcatggcagggaggggaaggacaaaaatgaatctaggccaggcgcgatggctcacgcctacaatcccagcactttgggaggccgaggtgggtgatcacctgaggccaggagtttgagaccagcctggccaacatggtgaaaccccatctctactaaaaatacaaaaaactagctgggtgtggtggcgggcctgcacctgtaataccagctacttgggaggccgaagtggaagaatcgcttgaacccgggaggcggagattgcagtgagctgagatcgcgccactgcactccagcctggacgacagagcaagactccatctcaaaaaaaaaaaaaaaagtaaagtaataaagaatggctactccggccaggcgtggtggctcacgcctgtaatcccagcactttgggaggccgagacgggtggatcacgaggtcaggagatcgagaccatcctggctaacacggtgaaaccccatctctactaaaaatacaaaaaattagccgggcatggtggcaggaacctgtagtcccagctactcgggaggctgaggcaggagaatggcgtgaacctgggaggtggagcttgcagtgagccgagatcacgccactgcactccagcctgagtgacagagcacgactccgtctcaaaaaaaaaaaaaaaaaaaaaaaaaggaaagtaataaagaatagctactgcatagagcagccgcctgggctgcttgttggcagtttttatggttactccttgaccatatgctaaacaagaggtggattattcatgagtttcccgggaaaggggtgggcagttcctggagctgaagggtcctccacttttaggataatttgcagacgttgccatggcgtttgtaaactgtcgtggcgcgggtgggagtgtctcttagcatgctaatgcattataattagcatgtaatgagcagtgaggatgaccagaggtcactttcacccccatcttggtttgagtgggttttggcagcttatttaccacatcctgttttataagcagggtctttatgacctgtatcttttgataccgttctgccaacctcctatctcatctcgtgattaagaatatctaacttgaggccggacgcggtggctcacgcctgtaatcccagcactttgggaggccgaggcgggtggatcacgaggtcaggagatcgagaccatcctggctaatacagtgaaaccccgtctctactaaaaaatacaaaaattagccgggcctggtggcgggcgcctatagtcccagctactcgggaggctgaggcaggagaatggcgtgaacccaggaggcggagcttgcagtgagccgagatcacgccactgcactccagcctgggtgaaagagagaggctctgtctcaaaaaaaagagaatatctaacttggccgggcgccatgggtcacgcctgtaatcccagcactttgggaggccaaggcagatggatcatttgaggtcaggagttcaagacccagcctggccaacatggcgaaaccccctctctactaaaaataaaaaattagctgggcagtagtggcaagagttgtaatcccagttaccaagctcctattcaagatggagttgctctggttcaaacgcttctgacagtacttccctctgatatcccccaaaccctgagatcccgcagggcccaaaccagggttcatgtctttcttccaaagtgcacctcctcctgggttcctacctgggtttgttgtcccagggcttttgtaacaaatgaccacaaactggggggcttggaacagcctctcccagtcctggaggccagaaatcagctatcaaggtgtgggtagggcctcactttctccaaggggagggtccttcctgcctcttcagcttctggggactccgggtgtccttggctgatggatgcatcactgtggtctctgctccatcatctgtgcgtctgcgtctcctctcctctgtgttataaggacacttgaggccgggtgtggtggctcacgcctgtaatcccagcactttgggagaccgaggcaggtggttcacttgaggtcaggagttcgagaccaacctggccaacatgacgaaaccctgtctctactaaaaatacaaaattagcagggtgtggcggcgggtgcctgtaatcccagtactcaggaggctgaagcagaattgcttgaacacagtaggtggaggttgcagtgagccaagatcacaccattgcactctagcctgggcaacaaagcgagactccatctcaaaataaaaataaaaaataaaaattaaggatgcttgtccttgtgtttggggcctgccttcatctagcttgacttcatcccaaattccttattgaaatctgcaaagtctctttttccaaatcaggtcacatttcaggttccagagtggctatatcttttttaaaattttataaaattaattttaatttttttgagacagggtctcactttgtcacccagactggagtgcagtggtatgatcatagcttgctgcagcctcgacctcccaggctcaagggatcctcccgcctcagcccgtttagtagctggaactacaggtgtgaaccaccacacccagctgtttgttttttttttattagagacaaagtctcactacattgcccaggctggtgcaaactcctgagctcaagcaatcctcccgcctcagcctcccaagtagctgggactgcaagtgtgtgccaccatgcccggctaattgtttttaatttttactggagatggggtctcactgtgttgcccaggctcgtctcaaactcctgggctcaagccatcctcccacttcagcctcccgagtacctgggactacagatgtgagccatcatgcccggctaactttttttttttttcagtagagttggggtctcactatgttgcccaggctcaggatggatgtagctctttttcagggagccaccattcaacccattacatcctcacaccctaccatccaagtgcatcccagccatccttgcctcctccctcccctcccctcgtcccccaccaaagccctaccttagattttcctgtctttgtccccatggccctctggggtagtcttcaccttctcccatactgaccttgactctgccccctcactggcctccagtcttctgtcctgcactccagtcccttcttcgtgctggccccaggaggctctttcccgcacacacctctgactatgcccaacccctgctcaaacaccttccatggctccccactgcccttgacatcagtccagcagttctttgcctgtttcaccctcatctgtcccctccaatggcatcccccatctcctgcaacacacttttttttttttttttgaggcaagagttttgctctgttgctcaggctggagcgcagtggcgagatctcggctcactgcaaactttacctcccaagttcaagtgattctcctgcctcagcctcctgagtagctgagtagctggaattataggtgcacgccaccacacctagccaatttttgtatttttagtagagacggggtttcatcatgttggccagactggtcttgaactccttacctcaaatgatccgcctgcctctgcctcccaaagtgctggtattacaggcatgagccactgcacctggcccttctttttctttctttctttttttttgagatggggtctcactctgtcatccaggctggaatgcagtggcataatctcaactcactgcaacctctgcctcccgggttcaagagtcattcttgtgcctcagcctcctacgtagctgggactacaagcatgaaccaccacacccagctagtttttgtatttttagtagagagggggtttcaccgtgttggccaggctggtcttgaactcctgaccttaggtgagccacctgcctcggcctcccagagtgctgggattacagacgtgagccactgcgcccggccctaccacacacttctgaaagcctatgttccacacaccaggcaggctcttgttctatggccccagctccaagaatcatccttcaggaagccgtctccaagcagaaccaggttgccttcagagcgtccccagccctgcctttctcttggcccgggctgaccacacagggtgtggaggggacaggagtgtcaggctctgcctcctcctagcaggaggatcacagagaatcacttcccaaaaaagagcattttcctgggctggagactggagtgtccttttgggctgaggtccccagctgcccgggctggagaaacttatccattgagcagatctcatgttccccaaggatcccccaccttgatccccaatgtacccttggtacccttgggtctcgagagatttgtgtgcagtgcattgtctatgaacttgaagatcagttctttttttttttttttgaggcggagtcttgctctgtcaccaggctggagcgcagtggcaccatcttggctcactgcacccaccaactccctggttcaagcagttcttctgcctcaggctcccaagtagctgggattacaggcacgaaccaccacgcacaagccaccgcgcccagctaattttttttttttgtatttttactagagatggggtttcaccatgttggccagcatagtctctatctcctgaccttgtgatccacccgcctctgcctcccaaagtgctgggattacaggtgtgagccaccgcgcccggcctaaagatcagttcttgtccaggctttgaaaatagggtgggtgcagattgccaatcactgagcattctgaaccattgatcccaggtgggacttccctgtctaccccctccagaaccccaaggctctccaggtgtgcagcaaggctgcacacctgcctctggtgcccttgccatctggggcaggtgtgtggggtgggagtggctggggctgggacacggtgagaggctcacctggcgtgggtgggggataagctgtggctcaggctgaggcttccttcaggggatccctctgggtctaggatgcaaccaaccagagctctcacagttgaaatgggatccacagggccctcagcatttgatccagccccgtgtttctgacaaaggtggcactagtttgttgttgttgtgtgtttgtttgagacagagtctccctcttgcccaggctggagtgcagtggcgcgacctcggctcactgcaaccttatctcccgggttcgagcaattctcctgcctcaacctcccgtgtagctgggaccagaggcgcgcgccgccacgcccagctaatttttgtgtttttagtagagatggggtttcaccgtgttgggcaggctggtctcaaactcctgacctcaggttatccacctgccttggcctcgcaaaatgctaggattacaggcatgaaccaccatgcccggcccaaggtggcactattttaaggttatttctagggaagcaggtacggcaagaggctgtgttcttcctcatattccttgggggagaattttggaaaagatgcgaaagccaggcagtggatctcagctgttagtgcatggtctgcagagctagactacctagatttaagccctcgacatttggccgggcacgatggctcgcacctgtaatcccagtgctttgggaggctgaggcgggcagattacttgaggtcaggagttcaagactagcccggccaacatggtgagaccccgtctctactaaaaaatacaaaaaattggctgggtgcagtgactcatgcctgtaatcccagtactttgggaggctgaggtgggcggatcacttgaggtcagcagttcaagaccagcctggccaacatggtgaaaccctgtctctactaaaaatacaaaaaaatggccgggcgcagtgactcacacctgcaatcccagcactttgggaggctgaggtgggtggatcataaggtcgggagttcaagatcagcctggccgagatggtgaaaatcctgtctctactaaaaatacaaaaattagacagtcatagtggcaggcgcctgtaatcccagctacttgggaggctgaggcaggagaatcgcttgaacttgggaggcagaggttacagtgagccgagattgtgccattgcactccagcctgggcaacagagcaagactctatctaaaaaaaaaattagctgggcttggtggcaggtacctgtaatcccagctactcaggaggctgatgaaagagagtcatttgaacctgggaggtggaggttgcagtgaggtgagatggtgctgctgcacttcagcctgagcaacagagcgagactccatctcaaataataataataataataataataaagcctggacattctacttaccacctgtgtgaccttgggcaagccacttcccctctctgtgcccccatctctcatctgtaaaatgggaacaatgccagcagctactgcataggggctactatgagtattaaatgattcagtatagagtataagcttattcttttctttttcagttttttctttttttctttggtttttaatttttttgttttggggtatttgtgtatgtgtgtgttttttaatttttttctgagtataagcttattaacattaaatatcaatggagtttttttgagacaaggttttgctatgtcgcaaaaccttggctggagccaggctggaacacagtggcacaatcatgcctcactgcagcatcgacggcccaggctcaagcgattctcctgtcttgacctcctgagtagctgggaccacaggcacatgccacaacacccagctaatttttaaaattatttgcagagatggaatttgactacgttgcctaggctggtctcgaactcctgggctcaagcaatccttctgcctcggcctctgaaggtgccgggattccaggtgtatgccaccacacctggcccagtggactttattaacatcactgcacgtctgtgctgatggggaactgtacgagtttgcaggcgctgccgtaaccacacaccacagacacggtggcttaaacaacagaaatttatttttgctcagttctggaggccagaagttcgaaatcaaggtgttggcagggctggttccttctgaggctgtgagggagcgtttattccaggccgttcccctgtagcgttccttgtcttgtaaaggcatcgtcccatctccgcctgcatcttcacgtccccctgcctgtgcgtgtctctgtgtctatttttccattttttataagggcaccagtcttattggatcagggcccaccctgatgacctcatgttgactaattccatctgcaatgaccccgtttccaaataaagtcacattcggaggtcctggggattaggactgcaaatgatgaatttggagagggggagaagcacattcagcccataacaggaactgtgaatcaaagctctatttatccaggggtgggtaaacattacgcattttcaccagctagaaacgacaagcaaagaggccaagaagaggttgggccaagagatcacggaagccataaggaagattttcagcaccagggacagcgtcagggcgggcttttgtgagcatgcgtctgtgtgtggcgtgtgcatgggcctgtgcgtgcgagtgtgtgtgtgtatggtatgcatgcagtatgtgtgtgtgcgtagtgtatatggtgtgcatgcattattgcattgtgtgtgtagtgtgtggtgtgtgcatctgtatgtgtgtagtgtgtgtggtgtgcatgcattgtgtgtatgtgtgtgtagtgtgtggtgtgtgcatgcatctctgtgtgtagtgtgtggtgtgtgcatgcatctgtgtgtgcggtgtgcatgcatctgtgtggtgtgcatgcgtcttgtctgcgtgtgtgtgtagtgtgttttgcatgcattgcgtgtgatgtgtgtggtatgtgcatgcatctatgtgtggtgcacatgtgtcttgtctgcgtgtgtgtgcgtgtgtggtgtgtgtatgtatctgtgtgcatagtgtgtgttgtgcatgcatcgtgtgtgtagtgtgtggtgtgtatgcatctgtgcatgtgtgtgtggtgtgttgtgcgtgccttgtgtgtagtgtgtggtgtgtgcatgcatctatgcgtgtgtgtatggtatttgcatgcgtcttgtctggtatatgtgtgcgtatgtggtgtgtgtatgcatctgtgcatgtgtgtgtgtagtgtgtggtgtgtgtatgtgtcttgtctgcatatatgtgtgtgtggtgtgtgcatacatctgtacgtgtgtgtgtggtgtgtggtgtgtgcatgcatcttgtctgcgtgtgtgtgtgcatgtgtggtgtgtatatgcatctgtgcgtgtgtgtgtagtgtgtggtgtgtgcatgcatcttgtccacgtgtgcgtatgtgttgtgtgtgtatgcatctgtgtgtgtgtagcgtttggtgtgtgcatgcacctgtgcatgtgtgtgtgtagtgtgtggtgtgtgcgtgcatctctgtgtgtgttgtgcatgtgtctttgcgtgtgtgtgtggtgtgtgtttgcatctgtgcatgtgtgggtgtgtgatgtgtatatgcatctgtgcgtgtgtatgtggtgtgtgtatgcatctctgtgtgtgtgcgtgtgtgtttgcatctgtgtgtgtgtggtgtgtgtatgcatctgtgtgtgtgcgtgtgtttgtgtgcatgcatctgtgtgtgtgtgcgtgtgtgtgtatgcatctgtgtgtgtgtgcgtgtgtgtgtggtgtgtggtgtgtgtgtgtgtggtgtttctttccctttcactgcagagctcccagaccctggggctgatggccttaaatgttgctcagggcacctacccactccctagcctcctagggccaccaccctccaaaccctgcagacaaggagtccacaggcaaaaaaaaaaaaaaggaacctaggaagaaggttttttacccttattttacatctgcctgcagcccaatttcttgccgatcaaacctgatttctctcaggccttagggctcgttgtcttagtgtagttcttttgaagagcttggggaataaaattcggaaaacaaacatcaagaatagaccatcacatacaacaacggcaacaggaaagatgagcacatagactctgtgaagagctcccccaaagtgacaaggtgcccagcttcattaatagttcttggaaggtgcattaaaatctcaatgaaatacaactgcacgcccaccttaatgactaacatttaaaaggttggcaaaaaccaagcattagtgaagatgaagcactaatagagcccgacataggcacaacccacttcagaaaacgatttgaaggaatcgatgaaagttaaacacacgcctgtcttatgcccagcacgtccctcctgggtatgctttttgcattaaaatatacggacaaggccgggtgcggtggcttacgcctataatcccagcaatttgggaggccacggcgggtggatcacttgagatcaggagattgagaccagcctggccaacatggtgaaaccctgtctctattaaaaatacaaaagttagccgggcatggtggcggacacctgtaatcccagctacttgggaggctgagacaggagaatcgcttgaacccaggaggggaaggttgcagtgagctgagattgcgccactgcactccagcctgggcgatagattgagactcagtctctctctctctctctctctggctctctctctctctcatatgtatatatatatatggacaaggctgggtgcagtggcttatgcctataatcccagcactttgggaagccaaggcaggaggatcacttgagcccaagagttcaggaccagcctgagcaacatagcaagaccccatctctaataataatagtaataataataataacagctgggtgtggtggcatgcaactgtggtcccagctacttgggaggctgaggccagaggatcacttgagcctgagaggtggaagctgcagtgagctgtgatcacaccactgcactccagcctgggcaacagagcaagaccctgtctcaaaaaaacaaaaattggacaagactgttgcagagcaactttattcataattgccccaaatagcaaacatcccaatgcccacccatgggagaatggataagcaatttttagtgtattcataggacacaatactacccagaaacaaaaaggaactcccccatgatgcacacaaccacatgctgttgactatatattgaatgaaagaagccagacacaagggcggacctatgctatgatttcgtttatataagtccaaaaacaggaagcactcaatcacattgatacgtgatgcgcacatggtggggacaccatcgtgaaggcatacacgagagctggggtggttacccctgcaggatggagggggttgtgctggggtgggggacactaggacttctggtggcttcatggtggctgccactttttacttttgttgttgagacagtctgactgtgtcacccaggctggagtgcagtggcacaatcacagctcactgcaacctccacaccctgggctcaagcgatcctcctgccttggcctcccgagtagctgggactacaggcccctgccaccacgcccgactaattttttgtatttttagtagagatagggtttcaccgtgttagccaggatggtctcgatctcctgacctcgtgatccacctgccttggcctcccaaagtgctgggattacaggcgtgagccatcacgcccggcctaatttttgtattttttatagagatgggttttcgccatgttgcccaggctggtcttgaaattgtgaactcaagtgatcctcccgcctcagcctcccaaagtgctgggattacaggcatgagccactgcgcccggtctctctttctatgtctcgacccaagacatagtgtgacatagttgtcttgggtcgagacatagagatggttgtatggatttataatcatttgttacattgcacgcttacgtgttctgcacttttcagaggggtacattggtaatatatcccaattacaatgtttattgtggtgatatatgcataatatgaaatgtaccgttaaaaaatttttttttaattgagaaagcactttgctctgttgcccaggctggagtgcagtggcgtgatcttggctcattgcaaactctgccgcccgggttcaaacgattctcatgactcagcctcccgagtagctagaatagcaggttcccaccaccacacctggctaattttttttgtatttttagtaaagatggagtttcgccttttgggccaggctggtcttgaactcctgacctcagatgatccaccggcctctgcctcccaaagtgctgggattacaggtgtgcaccaccgcacccggcccatcttaaccatttttaagcatagagttcagtggcattaagtacattcatattgttctgcaatcatcaccactatctgatcttcagaacttttattttactttattttagagacagggtctcactctgttgcctaggctggattgcagtggtgctatcatagctcactgcagcctccagctcctgggctcaagtgatcctcccaccttggcctcctaaagtgctgggatgacaggcgagagtcaccttgcctggcctccagaacgttctcatcttcccaaactgaaactgtatccctgtgaaacactcactccccatccccctccccagcccctggcaccccccatcctgatttccatctctgtgaatctgatggctctgtggtcctcctatgaaacctctgtctgtcgttttgtgtctggcttatttcaccgagcatggtgttctcaaggttcacccacgttgtgtcaggtatcagaatttccttcctttttgtggctggataatattccactgtgtgggtcgaccgtattgtatcgatcccttcatctgtgaatggacgcctgggttgcttccgccttccggccactgtgaatcttactgctgtcaacattgttatacaaatatctctgttcgagtccctgctttcaattcttctgaatatacacccagacgtggaattgctggcttccgtggtaattttgtgtttcgtttctggaggaactgtcaaactgttttctgcagcagccgtaccattttacattcctactacaaacttttttctttctttcttccttccttccttccttccttccttccttccttccttccttccttccttcctttctttctttctttctttcttttcttttcttttcttttctttcttttcttaatgctggaaactgttgtcagctctgcctggtacccccagggttccagggggctttttggacctggggtgggttccctcggattccctaccccctccccaccacacagcccagctggcgggagcgaccagcaggtggccactttaattagctcctgcctggagaagtggacaccgtggagctccgtacagcgtgtccctgggagaccagggaccatagggggcggggtttgagggggaaccgagggtttgacaacatcggagcagcccacgatggtctcatttcacaggtccccagacaggaccactcagtcccctgtatccatcccaggacccctgacctcctgtgtgcaatccctaccccaccttggggaaacgtctttcaaaatacttttgatctaattaggctttcagggcgagggcgggttctcttgacttgcttgtctcctgtctctgtctctgtcaacgtctctggtctcccacccctaacgtcgcccaatcacagcctcactctgggccaccagagggctggccccgcccctcgcttcccaccctccgatccctaatgttgcccaatcacagcctcactctgggccactctatgggctggccccgccccttgcctcccatccctaatgtcatccaatcccagcctcactctgggccactccggggctggccccgcccctcacctctcctgattggtcctgatttctgccaccatgccacaccctctcaagctccacccccatccattggctggtccaacttgtggtcctctcagaccatcccctctccctctgataggggaaggtgaggcccagagagggggagcgcatgatccaaggctacactgctggtcagtggcagagcccactgctccctatcccagggccaggccttcttccatctttctgggaccactagtgccctccccatcctccccgctgggcagcccctctgcccactcccctcaccccaccttgtccagggctctcagcatctcttttctgagctcagccactgactttgttaatggctggacctcctctccctcttcctggtctcaccctttgcgggggtgtatgtgtgtgcaggggtggaacgggtggaaaacactgagccacttcgactgtcccctcccaaaacatggtggcttcagcatcctcttctctttttattttttgagattgtaataagatatacacaacttcaaatgtaccgtcttaaccattttaaatgcatggttcaggccgggtgcggtggctcacgcctgtaatcccagcacttcgggaggccgaggcgggcagatcacgaggtcaggagatcgagaccatcctggctaacacggtgaaaccccgcctctactaaaaatacaaaaaaattagccaagcatggtggcgggcgcctgtagtcccagctactcgggaggctgaggcaggagaatgacgtgaacccgggaggcagagcttgcagtgagccgagatcgcgccactgcactccagcctgggtgacagagccagactccgtctcaaaataaataaataaaaataaaaattgcacagctcagtggtattaagcatattcacacggttgtgcaaccatcaccaccatcatctccagaactttctcatcttcccaaactgaaactctgtccccatgatacactcagtcctcattcccctccccagcccctggcacctccccattttactttctgtctgtgtgaatctgatgactctagggacctcctaggagtggaatcacacaggatttgtccttctgtgtctggcttatttcactgagagtgacattctcaaggtgcatccatgttgcagcctgtgtcagaatttccttccttttcttggctgaataatattccgttgcgtggatgcaccaggttgtgtagatctatgcatctgtggatggaagcttgggttgcttccacctagtggccactgtgggtggtgctgctgtgaccatgggtgtgcccgtgctctcttaacacccccgtttctctcccttccaggctgtgccttcctcacctactgtgccagggattccgccatcaaagctcagactgccctgcacgagcagaagaccttgcccggagtgagtcctgtgtggtgtctggggaggaggggacaggggatggctctcagcctggggtgggagccaaggctcttcctgagattggctgtgaattctgtgtgtctcgggactcagaaagaggtatgaggagcagaggtatagaaatcatcataatagtgtgcatttattgagtgcctactgtgtgccgtgctctatatttcataccagagtggttgtgtgtggttgtgcaggttgtatactgcacaagggcacctggcccagtgtgtcgttgtctttgggttgagacctgaaggataaggaagcattagcaggcagagggcacagcatgtgccaaggcccgggggaggaccatgcctgacgtgttggaggaacagggaggaggcccgtgtggctggaacagagtgaggaggtggagaaagaaaggcgggaagggcaggggaggtgacagggctggttgctgaaggctgtgtggaccatggggagaagcatagaccatgcttgcttctcactataaaaaggaaaatgattttcctcgcttgtctttatggtgcaaacggagccacagttccttaacacaagggcttcttttttttttttttttttttttgttgttgttgttgttgttgagatggagtctcgctttgtcacccacgctggagtgcagtgtcatgatctcggttcactgcaacctccgcctcccaggttcaagtgattctcctgcctcagcctcccaagtagctgggattacaggcgtgcaccaccatgcctggctaatttttgtatttttagtagagacggggttttgccatattggccaggctggtctcaaactcttgacctcaagtgatctgcacacctcggcctcccaaagtgctgggattataggtgcgagccaccaggcccggccaacacaggggcttcttcatcacaatttctgtctgcagaggaggctggcctgggtgctgtctctgatgagtctctccttatttttattttttgagacagggtcttgctctgttacccaggctggagtacaatggctcactgcagcctccacctcctggggtcaagtgatcctcctacctcggcctcctgagtagctgggactataggtgcatgccatcacacgtggctaattttttaatttttgtagagacggggtctcattatattgcccgggctgatcctgaactcctggctcaagcgttcctcctgcttcggcctcccaaagtgctgggattacaggtgtgagccagcacacccagcctgatgagtctctcctggtcagctttgtcctctttgggtgggcaggaggcccctgcccccagtgaaggatgagtggtctccctgagccagtcaatccgggtccccaggccatgcctcttgatggagactgaaggaaccacagtgagccacggcgccccaccttgtgagctctggggcagggagctcacccttccctccggaattctcagggacctttcagcctccagggacatcagggcattcgtagccttcgtgcttggctgactgtaggaaatctgacgtgcgccttccagggacccgaggtcatggcatgagtttgacttgattctccatgagcattggaaggttctgggcctgggggtggcctctgcttggtcttgaagaatagagagcccctcttttgggtgtgatgtgatgcaagttagagtgtggggtctggcagccacatctgtgggctcgttgctcagctccatccttgctgtgtgacagtaagccagtgacttaacctctctgatcttcagcactggaagagaataacagggcagggtgggctagcaatctatagagaaggtgctcagtggagggcttcactgaggatgtgacatttgagaaaaaacctgaaagatggcatggaagggcactccaggcagaaggaacagcatgtgcaaaagtgatctagagtctgcggtaaattccctgaattcactgttcatcttggaccttctgctggtgcctacccaaaccaaccagaagctaaaaaagtacattaaaaaaaaaaagaaagaaagaaatcccacaaccgaacaaaaaatcaaaccaaccagaagctggagggcaggtcagtccatacagattagtgcccaggggcacagcagagttctagggaccatattagttatttattgctgcataacaaattatccccaaaataaagacttcaaacaataagcacttgttatttcacagctaccaggggtcaggaatttgggactgagtttgctgcatgatcctggctcagggaggttacagtcaagatatcagcaggagtttgtggttgaggaatctgcttccaagctggctccctctagtgactgttcaggaggcctcagtttctcaccacgtgggcttctccacagtgctgcttgagcttccttacaacatggcatcttcccccagcacacgtaaccaaagagtgatcaaggaggaagccacagtcccctttaagccctagcctcggaattacacaccatcatttccaccacattctagcaccagaagcccaggggtgcagagcagggggggcaaaggtggagggaggaactcaaggaacaaaccagctcaatactggacttgtccaaggttaggcagcctgcaagctgcagagtggggatttggaccttcatagtctgactccagaccctgtgctgttgcctaattcatctaagtttagtgaaccatgtttttgcttggcatcaggtcctgggggaagctctggtccttctgtccagagaaatctgtacatagatggagatttaccaacacttctaaggagtcctcccagctaagcacttctcccccattcctttgtcctcatttccctgatgaaggtaactgagacacaaacccagtctctattccactgtctgaggccttagggaccttggaactggttcttttcctgttgggggccaaaactgagctctgcactctgttggcagccaggagggaagatggaagagggtggaaggaccaagagccacgaaacctcatgcccttcttgccaggctggtgtcctggatctgagtccactttgagatgaagagatgccgcaatcaccagcagctccttctctgcatccatcttgaggggactctgtccttctctccatgcctactctccctgggtcagcccataaattcatagcttccatccatccatgcacctttccatccacccatcacccatctgcccatgtgtctacatgcctgcctacctgtcacccatctacctgcctatccattcattcattcatccatctactcatccacctacccacccacacatccatcatccacccatcctctcatccagccacacgtccatccatctacgcatccatccatccatccatctatccatccacccacccatctatccatccatccactgatttaccctttcatccatccattcacacactgatccatgtttctatccattcatccacccatccacccatcaattcatccatccatccatccatccatgcattcattcacccatctactcattacctacccacccacccacacatctattatgcatccctccattctcccatccagccacacacccatccattcacccacacatccatccatctaccattcatccattgagtcactcactcatctatccacccactcatctatccatccatctgttcacccatttgcccttttatccatccatccatccacccatccatccatccattcatccatccatctatccattactcatccacccacttgtctatccattcatctgtccatccatctacccttccatccatccattcattcatcactcactcttccacccatccatctattaattcatgtatacatccatccacctatctatcctcccatccacccacacatccattcacccatctacacttctttccatctatccaccaaatttttatcaagcacctactatttaccccacgctatgctaaactcccatcatcagttctgtgactggtcacctcctgagtgactcctgtggccgtcccccagtccccatccccctagacccaatggggctcaaactggctatggcacaccccccaattttttttgagacagagtctcactctgtcacccaggctggagtgcagtggcttgatctcagctcactgcaacttctgcctcgcgggttcaagtgattctcctgcctcagcctcctgagtagctgggattacaggcatgagccaccacgctggctaatttttatatttttagtagagtcggggtttcaccatattgactaggctggttttgaactcctgacctcaagtgatccacctgcctcggcctcccaaagtgctaggattacaggcgtaagccattgagcctactgcccccgactgctttttttgaaccagtttctctccctcagtccctgggcatcagcctcttctcctccctcctcctcgcccccagagctcatggcccccacatcctgccctctcatttgttgccttctctctgcttccacctctgtgttctcctgagttcaaaccttagcttcccctctcccaagctgtgtaatcttcaacaagcatctttcccctcaaacctcagttttctttatctccaatatgggtaacactttctccacctaacaggctgcagagaagatttaaagacgtgaaggtgggtcaggcgcggtggctcatgcctgtaatcccagcactttgggaggccgaggcgagcagatcatctgaggtcaggagttcgagaccagcctggccaacatggtgaaaccccatctctgctcaaagtacaaaaattagctgggcgtggtggcaggggtctgtaatcccagctactcgggaggctgaggcaggagaatcacttgaacccaggaggcagaggttgcagtgagccaagatcacgcctctgtactgcagcctgggtgacagaacaagaccctgtctcaaaaaaaaaggaaaggtgcgaagtggatactatttttggaggtgttaagcctttatattctggtccttggccatctttagtttctaaaaatttctcactccccagacactgacgacccagccagggttcccacccctaaagtattcgtgggtaactgcctctcccgcctggagaatttctaccttactttcaaggtaacagctggccgtctcctccttctgctcatccctgacctctcagggctgggggtgtctgtgtctggctctgactcccccagattgggagcccctcaagggcagtccctgggctgagtcctccaaacccctttgttcattcagcatttactgagcatctgacttatgacagaatgaggatacagtacaaacagaaaataagcaagccagtgagaacaacattgagacaagaaatggggtgactttcagagcaatgactcaggacggaggtttcatttattattattattattattattattattattattattattaatttttttttgagacggagcctaactctgtcgcccaggctggagtgcagtggcgcgatctcggctcactgcaacctccgcctcctgggttcaagcgattctcctgcctcagcctcccgagtagctggattacaggcatgtgccaccgtgccatgctagtttctgtatttttagtagagatggggtttcaccatgttgaccaggctggtctcaaactcctgacctcaagtgatccaccagcctcggcctcctaaagtgctgggattacaggcgtcagccactgcacctggccttattattttttttctgagacaaagttttgctgtgtcgcccaggttggagtgcagtggcacaatcatagctcatagcacgatcatagctcatggtacgtcccactaatttttaaactttttgcagagatgggggtctcactatgtagcccaggcccgtcccgaactcctgggatcaagcgagcctcccacctcagcctcccaaagtgctgggattacaagcgtgagctaccagattgtgcctggctgggagttccatttagacagggtggtcagggaaggcctctctgaggagatggcctggagaggaggaagccgtgcactctctgcaggaagggcgtttctggcagagggaacggccagtgcaaaggccctgaggctggaccatgcccgaagcatgtgaggaccactgaggtcagaggagtgaagaagagtgagtgacggggagtgagggggagagtaggtggaggagagggggaagaggaagcagagacaggaccgccacagtgagcagcttgaattttgttccaagggtgactgggaccaggggacagtagcaaccagaggaacgatctggtttgtttgtttccacttttattattattatttattattattattttttttgagaccgagtttcactcttgttgcccaggctggagtgcagtggtgcaatctcggctcactgcaacctctgcctcccgggttcaagcgattctcctgcctcagcctcccgagtagctgggattacaggcatgcaccaccatgcccggctaatttttgtatttttagtagagacggggtttccccatgttggtcaggctggtctcgaactcccgagctcagatgatccgcctgcctcggactcccaaagtgctgggattacaggcatgagccaccatgcccagcctccatttttttttatttatttatttatttatttatttatttatttatttatttatttatttgagacagaatctcactctgttgcccaggctggaatgcagtggtgcgatcatagctcactgcagctttgacctcccacctcagcctcccaggtagctaggaccacaggtgcacaccaccatacctggctgatttttttttttttgacagagttttgctcttgttttccatgctggagtgcaatggcacgatctgtgctcactgtggcctccacctcccgggttcaagcaattctcctgactcggcctcccaacctggaattacaggtgcctgccaccaagccaggataatttttgtatttttagtagagatggcgtttcaccatgttggccagactggtctccaactcctgacctcaggtgatcctcccaccttggcctcccaatatgctgggattacaggcatgagccaccacgcccagccctgtgatttttaaattttaaatttttgatttaatttttttttttgtagagacagtggttttcctatgttgcccaggttggtctcgaactcctgacctcaagcaatcctcccgccttggcctcccaaagtgctgggattacaggcatgagccactgcgcccggcctgtgtctgtgtccctttgcttttctcttagaaggacacttctcattggatttagggctcagcctacatccaggataattttatctcaagatccttcatttaattacatctgcaaaagacctcttttctaaataagggcatatccacagatccccagggctaggatttggggatatatatatatacatattttttatttttattttttagagacagggtcttgctctgtcgcccaggctggagtgcagtgttgcaatcatagctttttacagccttgacctcctaggctgaagcaatcctcctgcctcagcctcctgagtagctgggactacaggcacatgccaccacgcctggctagttttttattttttgcagagatggagtcttgctatgttgcccagactggtcttgaactcctgggctcaagcgatcctcccgcctcggcctcccaaagcgctgagattacagacgtgagccactgtgcttagcctggatttatcttttggggagccaccatctaactcactccaggggtgaccacagaaccaatgaccaaatgtcagggtgacccagggacagcaccctgagggagaagcaggcagcctgcgtggacgatttagtgaagggtggacagggtggcttcttgaaggagggaatgtttgggatgagtcgagagatggaaggattttcacagatggaggtggagatgggggtgagtggggacaaaacttaccaagatttggaggccagaacatgcccagtgtgctgttgagtggcagctcatgggagcctctgtcagctaatgaagggggtcaggttaggtaaggaggggtctcaaccagggtgatcctgcccccgccccaggacactggctgctgtctgtggacatttgtggttgtcacgacttggggaggagatgcacctggcatggagtaggtggaggccagggacgctactcagcaccctgcagtgcccaggacggccccaccccagaaagcaattcaaccccaatgtccacagtgcccgggggagagatcctgtgttcattactttggggaaaaagttgaatcctctccctgctcacatcagacaccagaataagctcccgatggggtagacagtagaaaccaggaggaccccagctcctgggactcacctcctgtctccctccccactcagggtgcggattttaatgtgtgcagcctcctgggacctcagcagggaagcgggtcatgggacatagtctcttgggggtctgtggaatcccctaacctggggagggggtctcaatcaggggtgatccagcccccaggagacactgagcaatgtctgggaacatttacggttgtcacgacgtgggggtgctgctggcatggagtgggtggaggccagggacgctactcagcaccctgcagtgcccaggatggcccgactccagagaacgatccggccccaatgtccacagtgcccgggtgggagagaccttgcctaggaagataaggagcaagtaatgttctggaagagtgttatctaatagaaagagaatgtgagccacatatataatttaacatgttccaggagcaatatttaaaaagtaaaaaagaaacaggtgacattaattttaataatatatttcatttgaacccaatatatcccaattcttaccattttaacatgcagtctatgtatttctatttttctttttttatttattgagacagagtctgtctccatcacccaggccggagtgcaggggcgtgatcttggctcactgcaacctccacgtcccgggttcaagcaattctcttgcctcagcctcccaagtagctgggatcatgggcacccaccaccacgcccagctaatttttgtgtttttagtagagatggggtttcgccatgttggccaggctggtctcgaattcctgacctcaggtgatcctccctacctcaaatgatccccctgcctcagcctcccaaaatgctgggattacaggcgtaagccaccgaagactggctaaatatatgtatgtattttattttattttatttttagacatagggtcttgctctgttgcccaggctggagtgcagtggcaagatcatggctcactgcaaccttcacctcccaggttcaagcaattctcctgcctcagcttctgaagaagctgggaccacaggtgtgtgccaccacacctggctaatttttttttttttttttttgagacagagtctcacgctgtcgcccaggctggagtgcagtggcgtgatcttggctcactgcaagctccgcctcccaggttcacgccattctcctgcctcagcctccctagtagctgggactacaggcgcccgccaccatgaccggctaattttttgtatttttagtacagacggggtttcaccgtgttagtcaggatggtctcgatctcctgacctcgtgatctgcccgcctcggcctcccaaagtgctgggattacaggtgtgagccactgcgcctggccacctggctaatttttaatttttttgtagagataaggtcttgctacattgcccaggctggtctcaaattctggggctcaagcaatcctcctgcctcagcctcccaagtgttgggactacaggtgtgagtcactgtgcctggccatgactctactttttcatcagttttacaaaatgcacctacagatcaagggttgctgatagaaattaaatgtccaggtcgggtgcagtggttcatgcctgtaatcctagcactttagaaggccgaggcagggggatcatgaggtcaggagttcaagaccagtctggccaacataatgaaaccccttgtctactaaaaatacaaaaattagctgggcatggtggtgcatgcctgtaatcccagctattcaggaggctgaggcaggagaattgcttgaacctgggaggtgaaggttgcagtgagccgagattgcaccactgtactccagcatgggcgacagagcaagactccatctcagaaaaaaaaaaagaaattaaatgtccaaatctgtgagagaacaatatacaccagattttgaacatttagtatggaaaaattggattggatgtgaaatagctcattaataattttcaagaccaggcctggtggttctcacacctgtaatcccagtgttttgggaggctgaggtaggaggattgcttgagcccaggagtttgagacccacttgggcaacatagagagatcccatctctacaaaaaattttaaaaactacctgggcatggtggcatgtacctgtagtcccaaccacctgggaggctgagacaggaggatcacttgagcccaggaggttgaggctatagtgagctaggattgcaccactgtactccagcctgggcagtggagttttatttttgtttcagacaaaaataaaaacaaaaacaggaggggcccagaatggactgaagtttgctgaagcctgttctaggccaacactatccatggaacatttgcagtggtggataagttctctgcctgtgctgtgcagtgtgctgatcactagctccgtgaggctgttgagcctttgaattgggacgagtgtactcagaaactgatttttaaaattcatttattttattattttatttttttgagacggagtctttctctgtaccccaggctggcgtgcagtggcgtgatctcggctcactgcaacctccgcctccttggttcaagccattctcctgcctcagtctcccgagtagctgggattacaggcacgcacgcccagctaatttttgtatttttaatagagatggcatttctccatgttggccaggctggtctcaaactcctgacctcaggggatccgcccatcttggcctcccaaagtgctgggattacaggcatgagccaccgcgcccggccaagaaactgatttttaatgttacttagttttagtaatttgaaatttaaacttaaaccaccacatgtggctaatggctacaatatcggacagtgcaatccagcatgttctagaccgggggcagctgctgggttacagagcacagatccagagtgttctagactggagcccagctaccatatgggacgtagactgttctagaccagagaggtcaattactgtatcatggacagcataggtctagaatattctagacccagggtctggatcatatcggacagcacaaatctagagtctagaatctaaagcaagagaaaggcaagatttaaatttacacttaagggccgggcgcagtggctcactcctgtaatcccagcactttgggaggccgaggggggtggatcacccaaggtcaggagcctggccaacatgatgaaatccatctctactaaaaatacaaaaattagccgggcatggtggcacatgcctgtcatcccagctacttgggaggctgagacaggagaatcacttgaactcaggaggtggaggttgcagtgagtggagatcacgccattgcactccagactgggcgatagagtgagactctgtctcaaaaaatttttaaaaattaaaaaaatagataaatttgtggctcacgcctgtggtcccagcactttgggagaccgaggtgggcagatcacctgaggtcaggagttcgagaccagtctggccaacatggtgaaactccgtctctactaaacatacaaaaaattagctgggcatggtggcaggcgcctataatcctagctactcaggaggctgaggcatgagattggcttggattcaggaggtgaagtttgcggtgagccgagatcacgccattgcactccagcctgggcaacagagcgagattctgtctcaaaaaaaaaaaaaaaaaaaagggaggggagaccaggctgggtgctgtggctcatgcctgtaatcccagcactttgggaggcagaggtgggattacctaaggtcaggagatcgagaccaggctgattaacatggtgaaactccgtctctactcaaaatacaaaaaattagccaggcatggtgtcgcgtgcctgtaatcacagctactcaggaggctgaggcacacgaatcgcttgaacccgggagacggaggttgcagtgagccgagattgtgccactgcactccagcctgggcgacagaacaagacactgtttctagaaacaaagaaacaaacaaacaaacaaatatttcttaaactatttaaaagtactacacacggccgggcacggtggctcacgcctgtaatccccgcactttgggaggctgaggcgggtggatcacctgaggtcaggagttcaagaccagcctggccaacatagtgaaaccccgtctctactaaaaatacaaaaatgagccgggcgtggtggtgggcacctgtgattccagctactcaggaggctgaagaaggagaatcgcttgaaactgggatatggaggctgcagtgagccgagattgcaccactgcactccaggctgggcgatacagtgagactcagtctcgaaaataaataaataaataataaataagtaaaagtagtacacacacttacagaaaagtgcatgaaacataaatacttacaaaacaaacatcctgatgaccactacccagccggtcctctggaatccaccccatgccgtattactaagcccaactcttttctttctgctgaaggagccactatctggttgtcggtaacacgcctttgcttttcttcgtggttttactggatacagtggtgtgcccttggaattccagctactcagtaggctgaggcaggaggatcgcttgagcccaggagcttgcgaccagcctgggcaacatagtgacaccccatctgaaaaaaaacaaaattctctatggttttgccatttataaatatgtccctaaagcactaggtgtttttttttttttgcctgttttccttttaacctaacataaatgggataatagtctgtcatcttttatgtgtgccttcttgtttcactgttttttctttttctttttcttttctttcttttttttttttaagagacggagtcttgctgtgtcacccaggctggagtgcagtagcgcaatctcggctcactgcaagcttggcctcccgggttcacgctattctcctgcctcagcctcccgagtagctgggactacaggcacccgccaccacgcccggctaatgtttttgtatttttagtagagatggggtttcaccatgttagccaggatggtctcgagctcctgacctggtgatccacccatctcggcctctcaaagtgctgggattacaggcgtgagccaccacacccggccttttttttttttcttttttgagacagactcttactctgtcacccaggccagagtgcagtagcgtgatcttggctcactgcaacctctgcctccctgattcaaaatcttgtgcctgagcctcccaagtagctgggattataggcgtctgccaccacacccagctaattttttgtatttttaatagagatagggtttcatcatgttagccaggttggtctcaaactctgacctcaagtgatctgcctgcctccgcctcccaaagtgctgggattacaggcacgagccactgggcctggcctgttttacttaatttaatgatgacgagatttatctatggaaggccgggcgcagtggctcacacctgtaatcccggtgctttgggaggccaagaccagaggattgcttgagcccaggagttccagaccagcctgggcaacatagcaagaccccatctctacaaaaaaataagaaaactagccaggtgtggtggcttgtgcctggcgtcctagctattgaggaggctgaggtgggaggagcatttgagcccaggagattgaggatgcagtgagctattgatgcaaagcagacaagggcttagcctgggagggttcttggcttcacctgggaaagaattcaagggtgagctggtgatgttagcagcttttattgcaacagcagtgtaaacggcagtggaggtcctgctctctgcagagcagggccaccccatgggcagtgagccccgagcagaagttcagaggcagttctgcaggtatatttgtacccacttggttttgttttttgtttattttttgagacagagtctcgctgttttttgaggcagtatcttgagacactcccacccacgccatgacagtttacaaacgccatggcaatgtcaggaaattatcctaaaagtggaggacccttcagctccaggaactgcccacccctttcccagaaagctcgtgaatcatccatcccttgtttagcatgtgatcaaggagtaaccataaaaatagccaacaagcagcccaggcggctgctctatgcagtagccattcttgattactttcttttcttttctttttctttttttctttcttttttttgagatggagtctcactctgtcatccaggccagagtgtgatggcgtgatctcagctcactgcaacctctgtctcccgggttcaagtgattctcttgcctcagcctcccgagtagctgggattacaggtgcccaccaccacgcccagccaatttttgtatttttagtagagacgaggtttcactatgttggtaaggctggtctcgaactcctgacctcaggtgatctgcccatcttgacctctgaaagtgctggaattacaggcgtgagcgcaccacgcccgacccccacttttaattacatttaaattaagggacagattatgcagaaatttctaagaaaagagtgggacgtttcgggtcattgggtcattgccatggaaaggcggtaacttctaggtgttgctgtggcaacggtaaacggacatggcaccccggtgggcatgtctcagggagagctgcttcgactccatccctgttttagctagtcttcagtttggtcccgtatctcagccccgcctcctgagtcgagtctcacctcctacctcactatgatcgcaccactgcactgcagcctgggtgacagagtgagacccagtacaaacaaaaaaaaaaaaagaagaagaagaggaaagaaagaatcacgtgtgttgctgtgtgtatcagcgtcttgggcgttttcactgctgtctagtattccaggatgcaaatacgtcatttactcatccattcccctgttgggggacacttgggttgtttcacatgtctgttgagacaaatagagatcctcaagggtgttctttggtggacacacgtcacacttctctcaagtgtatccccaggatcatcagcctctgtggctaacacccacctgcttggcaaaggtgagacctgtggcgtgtgccaccttttcccaggaatgcctgcagaaatggagccagccttttggagtgagaatgggaggctggtgaggggcggatgggggctgctggggaggaagaccccccggcctgccagccacgtctgagcacgctcgctcatctgagctcctgctgacagctcctctgcagggagctgaagcacgaggttcgccctgtgctggaaaagcccacccaggcggctcacgtgcctgcacacgcccgcacgagcacagcctgggagtcggggaggagctgggtcacgtgagacaccgagacagccaccatctctcctgtgccctgcttcccccacccaagaaaacacctctgtgtgtgcgtgtgcgtgtgtgcatgtgtgtgtgtgtgtgtgcgtgtgcgtgtgtgttgggggacagtacgagtggacccttctgtctctttataagccaggaggggagtgatccaggtcatttgcttgactttccacttctaccccctcatcctggcacaggggagccccccccaccaaccgcccggcccaatactgctgctttctgaagagagggcaacccccccgtttccggttcccgcacaagtgtgacagcagtgtccatgggggacgtagtttaatcaactctcagcattctggaataggatccgaaattgaataacagaatcccagaatagatcctggaatggaccgtgggaccctggaattgaggctcagattccaggggaagctgctggctgggccgtcacagccccggacaccacttcccatccccaaagccagagcctggggttcctggagacagagagccccccaacactgggacagtgcggggaggggcagagggtccagcttctgtcccttggccagtgagggaggggccaggacctttgggactttgctgtctctttctttacaagagtcttgggggctgaggtacatcccagcaccctcagccaccctgctgctcatctgattgccctggaaaaagatgaatttgtgtgtctgcgtgtccttccctgctcagacgtggcagctgccttgagtaatgctgccctcctgaaacccctctctgtgcagggtcacagaggtggtcccctggcaggacccctacctcccctgcttacctccatgctgcaggacttggcccagagtgaaaccaaacctgagaatgggcaaggggccttaagacgcccagtgtgacagtttcacctccccagacctcagttttgtcatctataaaatggggccctagaagtagatttttgttttgttttgttttgcttttttgagatggagtctcgctctgtcgcccaggctggagtgcagtgatttgatctcagctcactgcaacctcggcctcctgggttcaagcaattcttctgcctcagcctcccgagtagctgggattacaggtgcccgccaccacgcccagctactttttgtatttttagtagagatgcggttttaccgtgttggccaggctggtctcgaactcctgacctcaggtgatccgcccgcctcagcctcccaaagtgctaaagtgctggggttacaggtgtgagccaccacacccggcacctagaagtgtttggaggactctgtaaggtgaggcctgtcaggtgctgaacgcagaacccgagctcggcacacaggcacagaataaatgaatgaataatgaataaatgaatgaaccatcctgggcacgtcaagctgcgagactcggggcgtcgtgtcatctttctgggcctgtgcagacaccaaattgtaagacactgcctggcaccagctcttgggtgacttcccgtgccaggcactgtgcccggcatgctcttggctgatggggatggagcctgggttttgctttccgaggagtctacaaacccgtgtatcatttccgctgtcatttgtggaccctgggctaagggtcttggtggggaacggagggtcacaaagcccagtgcccttgtgcccctgcctcccaccggagctaccccaagtgaggggcagtgtgtgtgtttagtggggaggggtcgtaatcaaggtaatgcctgggcaagacaatggaagcagatggagagagagcacggaagacttcagggaggaggtggcgtttgaggggtaaggatggggtgcagcgggggggcattctgtcaccagccacgttcagggggccatggcaggaggagcggggaggaatgactggggctgagcagcaaagggccctcaaatgccaggatcaagggctgagcctctacccagagagcaatagggagccacagcagcgtttagagcaggggaggggcttggcctgggtgtttcagagaggctggactggggcctaggtgggaggggaggaaggtcaatgggtgtctggggcagcccagataaggggtccaccttccttccttctctccacaccacttggaaataacccatctggggcttccactaaatctcttttttgagacggagtatcactcttattgccctggctggagtgcaatggcacaatcttggctcactgcaccctctgcctcccgggttcaagtgattctcctgtctcagcctcccgagtagctgggattacaggcgtgcactaccgcacctagctaatttttttgtatttttagtagagtcagggtttcaccatgttggccagggtgatctcaaactcctgacctcaggtgatccacctgcctcgacctctcaaactgctggggttacaggcgtgagccaccgcgcccggcccctcctctgaacctctactcttccaaaggcacaactttgcagatcccagagactccttggctgccccagcctcactgcaagacactcctcctgcagtcgttcccattccccaccccccaaggggcctcagtttccccatctctagcatacacaggtcagacagaaaggactgtttctcggccagccagtgcaagcccacccatgcccacagtgccaaaacgctccccagcccacaggaccccttggttggagggatgtctaggtccttaggacacctctcccttccccctctcccttttttggagatagggtctggctctgtcgtccacgccggagtgcagtggaagcgatcatagctcactgtggcctcaaactccttgggttcaaacgatcctccctccttggcctcccgacctctcccttctttctggtcttggtttgcccatctgtaaaatggaaatgcatgttttcatctcattaagttgtcttaagactaaacgggtcagcagatgtgggtgttgctccaacatgaaaaattgtttccaatcgttccaaactccgactcctactccaaaattcacagtgaattttccatcttcagtgcaggcccaggacagcctttggctcttcactctcctctaccctcagctctcccagctccaaccctgaccccatgggagagtttgtgtctggctctgtctcccgctccgccaggctggtgaagggtccttcctggagttccaaaattgaactcagccttgggggccccagaaccagagagtcatggggcacagcaggaatactgctgaagaaacggagaggaagggaagggtcagggaagggacgcagccatggggagccagagaaggtggaggagggagggagtgcactcggcagagacctcggtgggacagatggagagagggagccgggaggaggtgggcagagccagatggacgggcaggggcgacaggaggggtggggtgtggggagacccagatccccgcctggcacgcctcctcccggctcgggcgggcagcgcgggcagggcccgcctgggcgtcgggcgcagggcgcgcggcgcggggcccgagcgtgcagtgcggcgggtgcgcgcctgtgcgcccggggcggccgggcgggcgggcggcggcacgtggatgccagcctggcgcgcgtctccaggccggtgggtaaggcgggcgccgggccgcggggtggggacggccgggccgcggagctcggctttagagtggaggcctggagaggagggggctacccaactggcttcactggaccagaccaggaccccctctccccggccgaccctctccccgagctgacccagcggtggggggaagggacctcccagtaggaggcggaaggtcccaggctctgtggcgggtggggagatggggagcaggtacaccagccccccaaccccagaacaaggtgggggtggagggttcggtgatgggggcagcttctctccccgcggccgcccctccctccctccctcgtccatctccagaagattatatttaaatatctcttttgtgcaaggcaggagctgggctcgcccctaagaggcggtttccatggcaacaacaattgccagcttccgtgtggtgaatcagcgttgccatggcaaccccatcctcatctgcccaaggtgctgggaggggggaggaggtgagggccaacggaggtggggtgggaggggtggggggagcaggagtctggagctcctgcaggtgcccccccatctctccccacctcccctggcacccccccgcttccagcccagaagctggtcccatctggttgaaaccatctcccctcctgcctccagcctagcagggtgtggtacccaggtggaaagggccccggtgtgtatgcatgggtgatgtggggtgggaaaggggtccagctggctgggtgggggaagagcatggaggttttcctctcctaggtgatcagggtccctctgagggtgcggctgggcggcaggaaggttgggctgggaggattgggggcacaggatcagggaggcaggggcctcttggtttctggggccccaaagactgagttcaaattgaggaaagcatatgtgcccgggacatacactcaggaaggagggtgtcagaatgggagagggtcttagagaggggaggggacccagagatgaggaagggcctctgaagcaggagaggctcagcgagaggagggaagctgagggggtgggaggtggaaatccagaggggtctctgaggaggggagtgcaaaataaggggttgctgagggtggaagagtgggcacggagctggaacgggtcttagagaaggtgtcagatcacgagggacagagctcagtggggagactttgggggtcccaaaatggggaggaggcattatttatggcagtgggtggacagatcactgaatctggagtccagaaactcttcactcaccatggccttacacaaataacttctctcttagacaaataacagaaatctcaatgttgacatctgtagaaaggggtgaaaattgcacctctctctgaagcttgttgggcagctatgctgtgattagaaaacctggcatttggccgggtgcaggggctcacgcctgtaatcccagcaatttgggaggctgaggtgggcggatcacgaactcagcagatcgagaccatcctggccaacatggtgaaaccccatctctactaaaaatacaaaaaaaattagctgggcgtattggtgcgtgcctgtagtcccagctgcttgggaggctgaggctggagaattgcttgaacccaggaggtggaggctgcagtaagccgagatcacgtcactgcattccagcctggcaacagagtgagagtccgtcccaagaaaaaaaaagaaaaaaagaaaagaaaaaaaagaaaacctggcactttttcaagcgtattctctgctgaaactcaaaagtcagaagatcagaaagagcactttggaacccataggactcaggggatgtgggaatctatttcaagtttgtctgacttggaaaaaggtctgagagtagcactcattcccattccagacgcctttctgtgttggtggaagttggccacttccttctggcccattctgttcagcaggtttctccaattcctccatgtgtccttccccatgtggggagatgccgtggttccctgtctggagagagacagagcaagacatagacacttacagcctgagggagggggaggaaggagcccagaagagtgggaagagtccctgcatgggggcttttaagttgggttttgaaggttgagtgggagtttgccacagacatcaggttgggagaaggattgtgtcccaggaccagtggagatgcaaatgcctccccaactctcacatccctggagcctgttctcaacgatccaaaatagctcatacctaggacttggtatgttgtgagagttggtgccagtgagaatttttttttcattaaatatcattttcaatgcctggggtgggggacaaaagtgtctagaacaatgaatccagatggcaggctggtccactcaggtatgtccccacccaaagctcctggcatgactccacccaaagctcctgggagatgtggctaaatgtagctactttggtgtatcagtcagcactgctgagtaacaaactactccagtcattgtatttgttctcgattctgcaaagcttggtctgggctcagctggacggctcttctgttgggctctcctggggtcgctcaagcagctgcagtcagctgagacttgactgggcttagctgggtcagggtggcctcactcccctgaggtggctgtcagagaggcctctgtctccatgaggcccctcctcctcccctactgaggaggaggggcctcctcctgggcctatccacctggcagtctcagagttccaagagtggaagccacaaggtctcttgaggcttaggctcagaactcccgcaacttaacttccaccacattctatgggtcacagcaagtcacttggccaagttcaggtgccaggagtgggaaaatagactctagttcttgatggtaggaactgcaaagtcacatcgcataaagggactggaggaattgggcctatcacatttggggaagcaaggaggcttcctggaggaagggatattgttgggttttgagagctaagagttcgccacacagtttccgctgtaggtgggacagtgtgtaatttctttgactggggtgttagttgggtggtggggtgctgagggctggtggtgggaggtgggcagggctggcctgcagagctcaggcaaaaccccccgcctgccacacccccactgctaagcttgacttttcccttccccctctctctgcagatggcgcggccaatccaggtgaagcctgcggacagtgaaagccgcggaggtagttgtcatctctccgtggctgccaggctgggggttggcggaggaatgggagaagaaggaaaatctcttccttcctctctcctgcaaaaggggcagtggccgaggcctgtggatctggaactggcctccctgccccaaagcatgcagtagtcgcatgcctgctcacacaccttttggtggggggagaagcaggttccagagagcagaaggggctatgtccataggccccaagggaggatggggggtctagccaggtccagctgccttctcctgagtttgaaatactccactcccttcagggtgcaataactggggggcttcagacacagacaatgggggcctgaagggctgtggattgctctctggggtctccgtgtggaaatgtgtgtgtttatgtgtgcatgcttaaatgtgtgtgtatatgactgtgcacacctggcatgcctgtgtgcagatgtgtgtgagtacgtgcacatgtgcatttgtgtttctgcagctggtgcacataagcgcacatgtgtggtatgcagtggggatgccttcctgcctgtgtgcatgtgcgtgtgcccagcccgcgcatgggtgtgtgtgtttgcacatgtgtgcctgactgttggaggctgggcatgtgggcagacatgcaggctggggccagtgttgtctgtgtggggctggaccttggtgtcagggtgtgcccatggtgggggcatactcagctgttcccatgggacccaaatctagtcattcttggaaatttgtatatttcctctccatctcaagtggagactgaaggagggcagccagatttggttgagtggaggcatggagcaggagtgttaggatacctaggtatatgtaggagtccggtaaaggccctctgggatgggagcccctttcacactctccaccctggctgccagcgtgggacagggagtagcgaggtggggtctgtatgtctccatttttgtctctatttctctgtctctctctccatctccctctgtatctccttctcctttttctcttctcttgtctcttcatccctcttattctctctgtctctcacagtctctttcgcgcgcactctctctctgatctgtctctctctctccctgattctcagtctctctgctggtttctctctctccctcccacccccatgagtgacagctgccgagagcggtttccatagtaacccagctcaccgtccctaggagatgaagccaccacgttccccattaccagggagcatgcagttacccaagggggcagagctcacacaggagaggctggcccagctccggcctcagaccaggttccagcccagccccacccagcagggggtccagcctgccaaggcccctggtccactgagcacgtgaaccctcactccactccacagatggtgactgcctggcccctcttgatcccgacaaagttgggcaggggcctctgctgggcaccgtgaaagtgcggggaccatcagtgcccacctccgcctggcaggtccggggagcagacagaaagacagacagacagacagacagggacccaggcccggcgaggcagctcctagccctagtactcggtgcgggctctctgagtgcaccagagggaaaggtcatctccgcctggagggggagcagtggagcagagaccccaaaagactgcagggagggcattccaggcgggggcgccacctgggcaaaggccgggagatgggagcgtgcagggcccgtgggagggtggagagatccggggcagggaaagggcgcggctgggtcctccctcgcacgcgcagaaccggagccggcagggcccgggcgccgcgtcttcctgccctgccgcctccactctgctggagggagggaggaatcccggaggccctcccggaggccggggactcggctgaggtgggtgtcgccgcccacaggggaccggaagctgttcgtggggatgctgaacaagcagcagtcggaggaggacgtgctgcggctgttccagcccttcggggtcattgacgagtgcaccgtgctccgggggcctgacggcagcagcaaaggtgactggcgggggccggggcgggactgcgagaggggccgggctagctctgggggcggggcctgtggggagggtggggcctgcagcatggggaggagctggctctggggtgggaccctggggaggggcggggcttctccaggggtggagtctgtgggtgaggctgcaggggcggggccttggagaggggcggaattgcaggggcggggcctggggaggggatggggctgcagggtggggaggagctgcctctgagggcggggcctgtggggcagggccctggggaggggtggggcttctccaaaggtgggcccttggggagaggtgtggctgcaggggtggggaggagctggctctgaggatgtagccctggagaggcccgaggcttctccagagctgaagtctgtgggtgaggctgcaagggtggggtcttgggtaggggaggtactgcagggaggggtgaaatacgtagagttaggagggactggctccagggggagaggccctgggaagggtcggggctgagcatatagggggtggggctggccaggtggggcggggccaggccaataggaggctggggctggctgggagaagctggttcacaggggttgggtggagcagagactggtcccgcttgatcctacctgcatgctctctctgcatgctggctgtggggacgggccctgaagaggggcggggctgcggtggggtgggcggagatgcagaggcgtggccttggggaagggcaaggcttctccaggggctgcttatggatggggatgcaggggcagtaccttgggatgaggcggtgtctggtgggaggcgggggggcttctccaggtgctgcctgtgagtagggatgcaggggcgtggcttgtgatggggcggggtctggggaggggcggggcttctccacggacagagttacctgtgccctgtggtctcagattcctccacctgactattcgtaaaactgtttcctcctggttctgtctatgtgatttgtccatatgactgactggtggtctctggttgtgtctgtctgtctatcttcctgcctgagagtccaaatgacggtgtctggcggtctctgtccacagagctcatcatgtgggaccgactccactctggtctttcttaccttactagaactgaatgtgtctgacggtttcagaccattacctggttcttcctttttaaaattgagggctgggcgtggtggctcacgcctgtaatcccagcactttgggaggctgaggcaggtggatcacgagatcaggagttcaagaccagcctggccaagatggtgaaacccgtctctacaaaaaatacaaaaattagctgggcgtggtggcaggcgcctgtaatcccaactactcgggaggttgaggaagagcattgcttgaacccgggaggcagatgttgcagtgagccgagatcacgccactgcactctagcctgggtgacggagcaagactctgactcaaaaaaagaaaaaaattgagatgtcttccacatcctaccaaattcaccctttaaaaatgtacaatgaagtgctttttttttctattcataaaaccgtgcaaccatcaccactatgtaattccagaacattccaccccctccctccacaatatggctggcccttccatagtactctaccagtctggagccaggtgcagtggcctctgtatgttctatggactttgtcggtgggactgtgtttccattcacctgtgtctggtggtctctgtgtgtgtggctgtctgtctgcattagcctggctggctgtgtgggtgaccaggtctttgtctaactgtggctgtctgtctgtgtgattctcctccattctgacccttgatctggctgattgtccagctgtccgtctgagcaaacggctggctgtctttctgttatcagttctctctggctgcatgtgtctgacactggccatgtaggtctctgtgtcccctctcctgtggcccccgctcagccagtcctgtgaccccatcaccctctacctcttcttcttctcttggagcaggctgtgctttcgtgaagttctcctcccacacggaggcgcaggcggccatccacgccttgcatgggagccagaccatgccggtgagttggagctgcccttggccgtgggggtgggggtgggaaaggggtgagggggacagggatgaaacaggccatattcctaccgtcgctgtcatccggtagcccctggctgtccttcagagggggcacaggtggagaaagaggcgcagtccctggctgtggtccctggagtgggtatacacgtgtgagtgtgtgcagatgtggaggtgagtaggcaagcgaagtgtatgtgtgtgcatggatgtattacaagtgtgtgcgtgtgggtgagtgtgcatgtctgggtgtgagtgtgcccgagactgcatgcatgtgtgtgtgtgagtgcgtgtttgagtgtgtcattactagtaggcgagtgttatgtgagtgctgtgtgcacgaggggtgtgcgtaaatatgtatggataagtgtgccattgtgtgctagtgtagagatactagtgcgtgtgcgtgtatgagagtgtacatgtgtgtttctatgtgtgtgagcgtgtgtgtgagtatgcctgggccacgggggaggaagcacatgtgtgtgcatctgcaggtgcatttgtgggcaggtttgtgtgtgtgtgtgtgtgtgtttgtgtgtgtgcatgactgtgagtgtgtcagtattgtgggtgattgtgtacacgtttgtgagtatatgcaggtctgtgtgagtataggttgtgagtgggtgagtgtgtatgtgtgtacatgtaagggtatcctaaggggatgacacctgggttggatttgctgaggccaggagaggccctgacaaaaagaaaggctgggaggtggcaacaggtagcccagaggagccatagaagatggggccgcaatgcgaggctgagaagcctggactttctcctagggcagtggggagccacagacggtttagagcaagggaggagacaggccaggtcggttgcaaatatccctttggggctaatgtagaggatgggcagggtgcaagactagaggctgggaggccaaagaggaggctaggccaaggtccagctgaggtaggaggaggcctgagctggggccaggtggacagggaggagggctgatcagaaaacagacattagggtgagaatggatggggggcctgttgactcactggttgagggaggggtggggattggggacaggtcccagagtctgcagcagtgagaggctggggaggaccaaggaggcactggggactgcccttcccccgaggaaggagtccccagaagccattgttcctgcacccacatctccgaatctgctacaaggaagatgggacctgagaggaacaagccacctctctcagctcttaaaacccaggggaggggcttagttcagcacaagggcaagtgttcccaagctcagagatgtcccaggacagggctggtaggcgtctggaggagtgagttctctatcggaggaggcatgtcagcgaagacagggaggcaacagggtgcatcctgtgggagccagctcaccagggaggagctggtcgaaggggaagatattttccttcttgagccccagagtcggggtgtgggctggtttgtgaggggtgggaatggcctcctggcccctgcctcaggcctctcttttatttttttgagacagagtctcgctctgtcgcccaggttggagtgcaatggggcaatctcagctcactgcaatctccacctctcgagttcaagcgattcttctgcctcagactcccaagtagctgggattacaggcacgcgccaccacacctggctaaattttgtatttgtagtagagacggggtttcaccatgttggtcaggctgatctcgaactcctgacctcaggtgatctgcccaccttggcctcccaaagtgctgggattacaggcatgagccactgtgcccggccaccaggcttctcttgttaccgatatcaggacctgttgcagcatcctgactgcacagacagacactccctggctcaccgctgcttcgactgcccagggctgcctgttggtggatttcagcccagccctgtggcacctggacagccatggagtgggatggcagtcacatgggtttctgtctgtgccccagcaaagcagggcccccagtccccaccagtggctactgtccgctgtccactgggtggatgggccacaggttcatctgcctgcaaagggcacaaaaatctggggctggggctgggcgtggtggctgtaatcccagcactttgggaggtcgaggcgggcggatcacttgaggtcaggagttagagaccagcctggccaacatagtgaaaccccgtctctactaaaaataaaaaaaaaaattagctgggcgtgatggcgggcacctgtaatcccagctactcaagaggctgaggcaggagaatcacttgaacctggaaggcagaggttgcagtgagccgagatcgcgccattgcactccagcctgggcaacaagagcgaaactccgtctcaaaacaaaacaaaaaaaatccgggtccgaactgcctgctagctccagggcatggaggacagagtcaggatcatctacttgtcccgccttgttcctctcctgtggctggagtctcacctgttctcaggtgtgggtgagaattggaggctcacccatctgtgccccagttgttcctctctggagactggagtttcaggtgtggggtgacaatggcaggttcgtccacctgagcccactgttttccttcggaagctggtttctcacctgttctcaggtgagcggaagtcataggtgcctccagctgtgcctccctgttctccagcggcgggattctccatctgttttgagtgtgtggctgacagtcagggcccccacctgtgccccatcacagcctcctaggcctgggcgctgcacctgtgcagatgctgctgggcccaggatgctgatctccacgcggtcctcgctgtggccctggctcctggggtgggggcccgtggacatggctgacagccactggcattacacccctcacccaggaggcctgagctaacatgaatccagggaccccagagtcctggctacctcccagcccgtttccctccctgctcgccgctgcccctgcagggagcctcctccagcctggtggtcaagttcgccgacacggacaaggagcggacgctccggcgcatgcagcagatggtgggccagctgggcatcctgacgccgtccctcacattgcccttcagcccctacagtgcctacgcccaggctgtgagtgacccagtgacagcttcggggctccggctccgtctctctcagtctctgtctactctctgtcgggctcctgcctctccctccatctccctgactcagggtcctctcctggcgtggctgaaccccaactccaaattgagaccaagctcagaccgagcccctaaatccagaagactgagccctaatctcacagtaacacccaatcttggaccgagccccagaacctggctatgctccacgtctaaattaggcccaattctggctgaacctccaaatccagactgatcccaaactgagacctgacctgatcaagctccaccctggctgagacctgatcccaagttgagccccagctcctgactgaaccctgatcccaggctgagcctcaatttctaactaaaccctcatcctagatggagccttgatctcagtctgagcctcacttcctaaccgagccttgatcctagattgagccttagtcccaggctgagcctcgcttttctaactgagccctgatcctaggctgagccttgatcccaggctgagccccaattcctgactagattgagccctgatctcagcctgagcctcacttccgaaccgatctctgctcccaggctgagccttgatcccagtctgagctccaattctgatctcagcctgagccaagatacccagcctgacctcctcactagtaactggggtaccaagcctcccctcataagccatgatctcagggcagatatcaccccaactgtgacatgtcttcacccccagctcatgcaacagcagacaacagtcctgtccacctcgggcagctacctgagtcccggcgtggccttctcaccctgtcacatccagcagataggcgccgtcagcctcaacgggctgcctgccacacccatcgctcctgcctctggtgagcctcctccaggcacccaaggatgggtgggcagggctggagccagaactggcctccccatgaccctcttccgctctgcagggctgcactcacccccgctgctgggcaccaccgctgtgcctggcctcgtggctcccatcaccaatggctttgcaggtgtcgtgccctttccaggtgggcaccctgccctggaaaccgtctatgccaatggccttgtgccctacccaggtaaattggggtcgtcctctggggcctaggagagtggtggggaataaagatggtgtttctggaacaagtatgagtccctacatcacagtgcccagggaacagaagggcaggaaaaagggtgtctccgctgagcagataagagctgtggacacaggaagggaggccgtggcagggtaataacacattaaaacggtgcatctggatgtttctgagcttaaattccagttcagtgaccctggatgggctctttacgtccctgagcctcagtttgctcatctggaaaatggggcagataacatcagtagcctcagagggttgcattgacaatttaatctgtgtgcaaaaggcttcacacagggtctcactctgtcgcccaggctgcattgcagtggcacaatcttggctgactgtaacctccgcttcccaggttcaagtgattctcctgcctcagcctcccaagtagctgggattacaggcgcatgccaccatgcccggctaatttttgtagttttagtagagatggggtttcaccatgttggccaggctggtctcgaactcctgacctcaggtgattcacctactgcgcccagcccataaatcttaattattcatctgtgtcatttggggagatatcaatgcctggattcattcatttatccattcaacacagaatgaatgacccactgatttaggctgcacctgctttcatgaagcagaggtccttcctttctctatgctacacctacaattttagggcaaacatcttccaacatctaatttatgtgaagtaagttatctgtctttccaccatgtaggagaatttgtttctaactttttatttttttaattatttttatttatttagttttagagacagtgtctcactgtgtcactcaggctggagtgcagtggtgtcgtcgcagctcactgccgcctccatctctggggcttaagcaatcctcccacctcagccttccttgtagctgggactacaagcatgtgccatcacgcccggctaatttttaaatttttgtacagacgggatcttgctgtgttgcccaggctggcctcaaattcctgggctcaagcaggcctcccaaagtgccgggattataggtgtgagccactgtgactggccttaacattttattttgaaatgattggaggttcacagggagttaccaaaataccacagagcagtcccaggtacccttcacacagcttccctgatgccagcagcttatctaatcataggtcactgtcaaacccaggaaactaacactggcaccatacaattaattcaactccagacggtattcaaatttcaccatttatttatttagcgacagagtctcactctgtcgcccaggctggagtgcagtggcgtgatcatagctcgctgcagccttgaactctcgaactcctgggctgaagcgatcctctcacctctcacctcagcctcccaagtcactgggactacaggcacgtgccattatgcttggctaattttcgattttattttattttttaagaaatgagggtcttgctatgttgcccaagctggtctcgaaactcctgggctcaagcgatcctccttcctcggcctcccaaagtgttgggatcacaagtgtgagccaccacacccagctgatttcacgagtttttgtatgcactctgtgcacgtgtgtgtgtgtgtgtgcaggggcggttaattgccattttgtcacagatgcagacttgtggatctcccacagtgaagatacagaactgcttcttgcccacaaagtgaactccttcctgccacccctttgaagtcacagtcaccaccactatcccctgccctccagcacactctccattcgggcagaattgtttggctgaatttttccccagaatcatcagctttggtggcctggacaacttcttccctcccctacccctttccctagcggtagcaggaaggctacagctagatgggggagctacagggtgtctgatgaggaaactcatgtggagagggagacggggcaggggatgggggcaggtggtgatttgaggtggaggctgaagtcctggtgaatccagggagtagagaggagtgaagggtcccccttgggaggcaaccgggtcgggatagggagagggagatggggacgatggtgatctctctctggagtccgagaaacccggattccagttcagcttctgccatttgctatctgagtggccctgtgcaagtggcttcaccttcctcggcctcagcttcctggtcctacagagggtttagcacagaggagaagctgggcggggtgtttgttgctgtccttgcggctcttaaggatcgggggtggatggaagacttctgctgctcccgccccactcagcccctctgtctgcccgcagctcagagcccgactgtggccgagacactgcatcctgccttctccggagtccagcagtacacaggtaggaggcagcccgcgtgcccgcgctgggccctggccccgcccccgcctagggccccgcccccagggcccgccccggacgtgtcgttcttctgtgcctagccgcgcctcctacctctggccccgcccctcagggcccacccttagccccttgtcctgtattcaaccccgggccctgttactggtcccaccccaccaccacctatacccgcaaacaggaccttcccttgtcctttaaggacagcgcttacccatggccttaccctctcatgttctgtgttggggagagggaattccccttgaccacgtctctagctctgacccaaccccagctctcggccctgccccttaccctccctcctgcagctcctagccccgcccctcacttcctgcctttactctgaccacgcctctctgataaagccccgcccctacctctggctctacttcttaaggcctggctgtgaccccgccctctgctgcggccccgccccttaactcatggtcctgcccacatagccctccatcaagtcacggccccgccccactcatgcccttcatcccagtcttgcccccgccctccactgtgaccccacccctcaagcaatggtcccgcccactctggactgtcctgtagccttggccccgccctctactgtggcccaacccctatacccctcccctcacgccatggggtccgcccccacccccccttccccgccccgtctcggtattggccctgccctccaccatggccccgcccctcaggcaatagcccctccccgtttcgtctgtgatcttggccccgccctctggcctggccccgcccccaaaccctccccacaaaggccatgatcacacccactcctgccttggccccaccctcttatggccccgccccctccccgcccagcggcccaggccgcccacgtggcctcacgcccctcctcgccctgtgtctcgctccggtctccgcagccatgtaccccaccgcggccatcacgcccatcgcgcacagcgtcccccagccgccgcccctcctgcagcagcagcagcgagaaggtgaggcggccgcaacctcccctgggcgccagccccgccctctgcccgccctgtccacctgcaggctccgtgtctggcccgggcctctgggacccgcggggctgagagtgcggcctgggggctggacaggccagagttgagtcccggtgcagccgctgacccctgggaatctccctctctgtttcctcctccgaaaagagaaccatgctcgccccgaccccgtaggaatagcagtgacttcctaccagccctctccagaaccaagagtgattctctggattttttggaaaggaaaccctttttgaggctggggcatggcacgatgaggtatcaggtaatgaggcctccccagtaaagccaaggctgtcgaaggagggagggattcgattctggagtctgacagtcagggttcaaatccatacagttcttgccatgtgcggtagatcccgcctgtaattacatagcgttttgggggccgaggtgggaggatcacttgagcccaggagtccaagaccagcctggcttagcaagaccccatgtctacaaaaaaattaaaaattggccaggtgtagtggtgtgcacctgtagtcccagctactcaggaggctggagcaggaggatcactgagcccaggaggtcaaggcttcagtgagctactatctccccactggactccagcctgggtgagagagcaagactccatctcaaaaaaaaaaaaaaaaaaaaaggccgggcacggtggctcacgcctgtaatcccagcactttgggaggccgaggcgggcggatcacaaggtcaggagatcgagaccatcctggctaacacggggaaaccctgtctctactaaaaaatagaaaaaattagctgggtgtggtggcgggcgcctgtggtcccagctactcgggaggctgaggcaggagaatggcatgaacccaggaggcggagcttgcagtgagccgagatcgcaccactgcactccagcctgggcgacagagcaagactccgtctcaaaaaaaaaaaaaaaaaaagaaaagaaaagaaaaaaatcccaagctggtaacaacccaagtgttcatcagcaggtaaatggataaataaattaggatggagctgcacgatggaacactatacagcagtgaaaaaggataagtagccaatactcacaacaacatggaataacttcacaggcagaatattgagtgaaagaagccagataaaaaagacttcacttaaatgaagttttaaaacagtaggccaatcgaggtggctcatgcctgtaatcctagcattttgggaggctaaggcaggtgaattgcctgagctcaggagttcaagaccagcctggccaacatggtgaaaccccatctctactaaaaatacaacaattagccgagcgtggtggcgtgtgtctgtaatcccagctattggggaggctgaggcagaagaatctcttgaaccaggaggcggaggttgcagtgagccaagattgcgccactgcacttcagcctgggcaacagagcgagactccatctcaaaaataaataagtaaattaaattaaaaaaataaaaacgaggaaagctggctgggtgcggtggctcacgcctgtaatccaacactttgggaggccacggcaggagggtcacttgagcccaggaggtcaaggctgcactgagccaagatcatgccactgcactgcagcctgggcaacagagggagaccctgtctcaaaacaacaaaacaacaacaaaatcaaaaatctttatcagtgacacgttaagagaaaagaaagatgggaacgtagtagaaatggtagcactgttttctccatgttatgtggtttagaaatgcatgagactacaataaataccgtgcttggccttggagaagacctagaatgtgcacgtggaaacggcatcgaaagggttgttgcatgtgactgtgaaacggtggagggagggttgtctgaaatcagacagatagcatgaccccggatggggaaggtgcagctcacagcacactgggggagctgtgggagggtgtgtggcatgcagcgtgtattttcttctgaaggtcagtgcagctggatgtgtttttcagcggtcgcccacagttttggtggggatgaagcagtgcacgaacaaatgcaaaattcaggttatgctcaaaattgttcagttacattggaacagacttacatttcaagaacaagcattggctgggtgcagtggctgacacctgtaatcccagcactttgggaggctgaggtgggcagattgcctgaggttgggagttcgagaccagcctggacaacatggcgaaaccctgtctctactaaaaatacaaaaattagccgggcgtggtgacgcatgcctgtaatcccagctactcaggaggctgaggcaggagaatctcttgaacctgggaagcagaggttgcgatgagccaagatcacgccattgcactccagcctgggcaacaaaagcaaaactccatctcaaaacaaacaaacaaacaaacaaaacaaaagaaaacaagctttggccaggtgcagtggctgacacctgtaatcccagcactttggcagggcaaggcagaaggatcgcttgaggccaggagttcaagaccagcctgggcaacatagtgagaccccatctctacaaaaaaattaaaagttagccaggcatggtggtgcgtgcctgtggtcccagctactcgggaggccaaagtggggggattgcttgaatctaggagttagaggctgcagtgagctatgattgtgccactgcaatccagcctgggtaacaaagagaccctgtccctttaaaaaaaaatccattgctggcaagcgcagggattcctcttgttgtggggtgggaatggaagaaggtcatttttaggtttgggattagcagcagacttgagggactgtttaaggcttcagatgaacaaggttttaaaggctattgttatttatagtttttatattagccatccatcagggatttggagaggggacaatttagaggattatttgtaacttaaaaataattatttatggttggtatattatgttgtagtttaattatctgtagttttaggatatctgggactggggaccagagaattatctttttatttcacctgattttgtttctgcatcatctgagttttgaaaattatccaaggtctggggagttatccctagctggggtttgagaaagggaaataataaaaaaaatttttttttggctagacgcagtggctcacccctgtaatcccatcaccttgggagtctgaggaaggaggatcggttgagcccaggagttccagattagcctgggcaacatagcgaaacctctacaaaaattagccaggctgggtgcaatggctcacgcctgtaatcccagcactttgggaggccaaggcgggcagatcacttgaggtcaggagtttgagcccagcctggccaacatggtgaaaccccatctgtactaaaaatacaaaaattatccgggcttggtggtgggcacctgtagtcccagctacttgggaggctgaggcaggagaattgcttgaatccaggaggcagaggttgcagtgagccgagatcgcaccactgcactccagcctgggcgacagagcgagactccatctcaaaaaaaaaaaaaaaaaaaaaaaaaaaaaaaaaattagcaacgcatggtggctgaacaccagagttttacaaatgagttttattttagagacattattattattattattgcaaagatattaccaagtttccttattctccacacccagctcatctgacttttgtaaatgatccagagtttgaagtttagggagggattttctggagggtggccttcctcggggttttcaggtatctggggtcagagattgagggttgatctgggctttggggagcaggggatcccctgggtcttgtcagttatctggagtctgaggaccattttggtgcggagtagccccgtgtgagatcgtacagtgcaggcaaggggtgggtgtgtcccgtctccctccccagcccgtggccaggccccttctttctgggtgtctgaggcacccctctcccgacagctggagaagccagatgcgggctccagacctgtgcccctcccccgggggggttcgcctcctctccttgggggctttatgtctttctctcccccacctgcaggtcccgagggctgtaacctgtttatctaccacctcccccaggagtttggagacacggagctgacgcagatgttcctacccttcggcaatatcatttcctccaaggtgtttatggatcgagctaccaaccagagcaagtgtttcggtgagtggccgccgacgccacccctccccatccacctccctcgcctgccccctgacagggaatgggagggttttggtcggcctcgggacagggctgtgctgaaataatcacaatcagaaccagcctgtggccgggcacagtggatcacgcctgtgatcccagcactttgtttgttttggtttgggtttcttttttttttttttttttgagacagagtctcgctctgtcgcccaggctggagtgcagtggtgcaatctcggctcactgcaagctctgcgtcccgggttcacgccattctcctgcctcagcctcctaagtagctgggactacaggcgcccgccaccacacccagctaattttttttttttttttaagtagagacggggtttcacagtgttagccaggaaggtctccatctcctgacctcgtgatctgcccgcctcggcctcccaaagtgctgggattacaggcatgatccactgcgcctggccaatcccagcactttgagaggctgaggtgggcggattgcttgagtccaggagttcaagaccagcctgggtaacataatgagaccccgtgtttacaaaagacaacctttttaattagctgagcttagtggcgtgtgcctgtagtcccaactactcaggaggctgaggtgtgaggaccccttgaacccaggagttcaagaccagcctgggcaacatagcaagaccccatttctacaaaaaatacaaaaaaaaaattagccaggcttggtggtgcacactggtagtctcagctacttgggagatggaggtgggacgatcccttgagtccgtgaggtcgaggctgcagtgagctatgatcacaccactgcattccagcccagacaacacagcaagaccctgtctcatacaaaaaaacaaaaatggccaggcgcagtggctcacacctgtagtcccagacctttgggaggctgaggtgggtggttcacgaggtcagaagatcgagacatcctggctaacacagtgaaacccccatctctactaaaaatacaaaaaaattagccgggcatggtggtgggtgcctgtaatcccagctacttaggagattgcagcaggagaatcactagaacccaggaggtggaggtggaggttgcagtgagccgagatcgtgccattgtactccagcctgggcaataaagcaagactccgactcaaaaaaaaaaaaaaaaaagaactgaggcctgaatgaggagcaccaggcatgggaaatctgggggaagagtgtcccaggcagagggaacagcccatgcaaagaccccgaggcaggacggcgcctgacatgttggaggagcagtgaggaggcccatgtggctggagcagagtgaggagggggagagagggaggagggggaacatggagaggggacaggggagggtgaccagggccttgtgagcctcagggaggacttccttgtacccaaagacagaggacattaaggctctgaaaagggctgcaatttgtccaaagtcacacagcaggaaagaggtagaagaacctggagtagaaccagactctttttttttgttttgttttttggctttttttgaggcagagcttcactcttgttgcccaggctggagtgcaattgcacgatctcagctcaccgcaatctctgcctcttgggttcaagtgattctcctgactcagcatcccgagtagctgggattacaggcacccgccatcacgtctggctaatttttgtatttttagtagaaatggggtttcaccatgttggccaggctggtcccaaactcccgacctcaggtgatccacccgcctcggcctcccaaagtgctggaattacagacgtgaaccaccacacccggccaaagaccagactgttaacctcacactgtcctgtttaaagggtcagcccttgactttgtttttttttttttttttgaaatggagtcttgtgccatcagtgcgatctcggctcactgcaagctccatctcccaggctcaagcgattctcctgcctcagcctcctgagtagctgggattacgggtggacactaccatgcgtagctaatttttgtatttttagtagagacggggtttgaccatgttggccaggctggtctcaaactcctgacctcaggtgatctgcccgtcttggcctcccaaggtgctgggattacaggcgtgagccaccacgcctggccatggggtggagtatttctgatggcctctggacagagactggagcagaggtactgacagagatggagagaaagagacagagatgagacagaaggagagggagaggaagaaaagactcaagctagagaacgagagaaagaggggaggggagagaaacagagacagttagctgggcatggtggtatgggcctgtggtcccagctactcaggaggctgaggcaggagcatctcttgagccaaggaggtcgaggctgcagtgagctgagattgcgccactgcactccagcctgggtgacagagtgagatcctgtccccactcccttctgcaaaaaaaagagagagacaaagttgtggacacacagtcagctggagacacagatcctggctggacagagggcttggaaggaggcaggcatcctcctgagggaaggtggggaaaaggtggccctccaggaccctcggaagccccacctggcccctataccagctgggaagtctcagcacagccgaccccaagataaggagtgagtgccccatcctcagaggtatacaagtccagaggtgtcagaacaaagccagggctgctgtgtgtcctccaccacaaacaccctggcctgtgcaggtgtgcacgcaggcctgctcaggaccccgtgagccgggaagccagggccacagcataggaacaagccgaggacacccgcagcgccaaccacggaggtccaccctggtttctgcaggcttcgtgagctttgataacccggccagcgcccaggcagccatccaggccatgaacggcttccagatcggcatgaagaggctcaaagtccagctgaagcggcccaaagacccgggacacccctactgaccgcgcccacagccgccctgaggctgtaggcatggcccaggtgagccgccaggcggccccacccccgcccaagccccccgtcttgtctgaaaccccctcccgcggcccacttcatgctccaaaccctccccaggtggggtgatgcttcaagaggctacaagaaacctccgggttgggttggcggggacagagctggatgtagacacccccgatccccctgtggttggggctggagcagagggtgggaatggggtagggactgaggtgagccagggcccagtgaggtcggttagggaatccttcccggagaaggctttgagggctgaatagaagttcacctgagaggccaggtttgctctgggggtgggggtgcggtggggagggggttctgtcctgtcctatgagtctgttttccctgctgaaaacccaacaccagacggaaatgccaagtgcccaccccagaccccaaaccctaaggttggaccccaactcggaaccaggagtggagcgtggaaggtggggacagtgctcagggcccagtccagttggcactgacagcttccagtgtccccgctccatttccactagttcccctgggacaagcggcccctcactgggtgtcattcctacccaatgagttgatggaaaagtgggattcgtgccccacccaccatcatgcaagaaaaacaagcaaaacgaaacccagactgtagtttgccatcagggcaaaccactttctcaacatttttttgtggggggatgaacagtaaaccttgtggggccactgtggaaacttaaccgtgggtctcaaaccttgatgagcctcatctgtaaaatgggttcaagaaagtcatctccccagagacggcggaaacggtccacctagggaacagagtggggcatcttttcgcagccgagcccagaacccatcacctaaagagttctggatgattcgttttgattttttttttttttaaatcaccatcgctgtcgtcatcagagtctcgcctagggcctggcacagagtagacgctcagttagaagctgtctggccttttcaccttctcccgggtcagcacacacagatttgggagtatttacctgcacagaacgcaccttcaggaactgccaaccagaagcaaaatccaaagctgctctctgcgatcccttcacttttaactctcagtctgcactttttttttttaactgagcatctattatgtgctaggcactgttccagtgctcggggacgcagctgtgaatgaacagaaacgggggatggaggacaggggagaaacccccttcacgggccttagatggcagggggtagggaaggagagacagaaaataaacagaaatatctgtccccagctgccagaggaggaggaaatgggcttggtgatggtgacattaagttctttgaaagctgggtttgttggcctctgaactctggcctttgtgggatctgttcttttggaaaagatgggagcccctgtgttcctagatcccagcctggccgggtggagtagggtggggaggtggtgtccacctgtgtggccccgttctcactccctaacgcccgtcccttctcccccaggtgaggggccttcccatcccaggagggttttctgcttccaaccgatccaggacttacccataaattccaaccgttctttggacaccagccctttcctcccctcttctccccttgccctgcccctctactggaggccacctggagtggcgaggggcctttggggtctgtcctggggcaggggcgggggtgggggaggctcctgaatcgtgggcagaagtgttcacacgccccccctgctttgggaaacgctctcgcttcttccccacaaaacttggtgacttccccaaactaaatcacaccttttcctatatatatatatatgcatatatatatagatctatagacagtatatatatattttgagtacggatcatgggaccaaacttttccgacttccttccatccgagtagagtgaccctgggccggtcactcagcgggggacacaggaagggctgaggttggcgggaccccgcgcaacacataccaggtgccccacccccacccccaccacctcctggctggcacatcccaccaggaacccgccaacacaacatacctccaggacttttggcaccccccaccaccaattctccagggccgttgggctctgccagcttcagtgtccctggtcccagctgcagcctccagaccccacctcgccccttcgtcccagagccctgccctccgggatggatataggtacaacagagacgctctggcctgcctcagcccttctctgctcccctgcccgagtcatagccttactcatgtgaccaatagcccttagctttccgtcggagggggggggcggacagggttggggggagcccccctgcccctcaccaccccctcccaaggccaggcagccattgtccctgccttcgaatcaccagcctcgaatttaaggtcttgtaaccaggattgccaagcgtagcggaagaccctacccggaccggccaagcacccctttaactggagacgaacttgataatgaccttcatacctctacagagatttttttttttttccggtctttctgagcaggtacaaagaagaaaagagaagaaaaagatggggggaaaaaatcaaaccacaatggatttttgtttcctagttgggagtggggtggggtggggtgtctttgtgagggtgcctctgtacagctgcccaatccgcgacacccacgtcaaagcacagcatcaagttcgtttggacatccggcaaggcctcttaccaaatgaggcgccagataacttaataagctcaaaagaaaaaaacatttaaaaagaaagaaaaaaaaaaaaaaaaaaaccaagcatttccttttctttctaccaaaatgtgttgactgacccggagggggggcggtagggtgggggaaaccacacagaaaaaaaaaaaaaaaaaaaaaagaaaagaaaaaagaaaaaaaaatagaaaagaaaaaaaaaaatcttctgaaccaacttgtttcgatattccagagtttgataattgtttcgagactctcctctagcgtgcctgtgttccgtgtgtccccgtgtgcaagcgtgtgccatgccaatctgcctcgagggggcctcacccgtgtccgcggcgcccgccgaggcccccgagggcctgcttgggagtgtgtgccggtgtgcagttgtacgtgtctttctggtccatgtttactggctgtaaataccatttttatactccacatcgcagacctgcgtgatttgtacaatgtactttatttctgctacgagtaatttcatgaagtttcaacttgcaaactgacttttgggacaaaccaacacacacacagaagagaaagcaaagaacttggaactttgggttgactcggtttgagttttgtgtcaaagaagatttcccgcggctgaagaggttggtgttcctgttacgtgtttcaggtgagaagcagcaaagcgtcttaatgttcaaaacgcctctctttggtctggagaaaaaaaaaaaaaaaaaaaaacaactaaaaatttatttaataaaagttttacttgctaaagggctgactcttctctttctttcctctctctgtcatccacacagaccaagtgtatctggccccatccagcacctgggctggagagaaatgcaggtttagggtgaggggttgaaggaggggatattcagagaaaccaaatgtagatatagataccaggggccaggcgtggtggctcaaacctgtaatcctagcactttgggaggccgaggcaggtggatcgcctgaggttgagagttcgagaccagcctggccaacatggtgaaaccccacctctactaaaaatacaaaaaaaaaaaataacaaaaaaattagccaggcttggtggcacacacctgtaatcccagctactcgggaggctgatgtatgagaatcacttgaacccaggagttagagtttgcagtgagctgacatcgcatccctgcactccagcctgggtgacagagtgagactctgtctcaaaaaaaaaaaaaaaaaaaagttaccagctctaatgatcgggtatctgggatctgtctgctgaagccagatgcatttcttgatcatattacagctgtttgtttgtttgtttgtttgagatggagtcttgctctgtcgcccaggctggagtgcagtggcatgatctcagctcactgcagccttaacctcctgggctcaagcaattctcctgtctcagcctgagtagctgggactacaggcacataccaccacagccggctaatttttatattttttgtagagatggagtctcactatggtgcccaagctggtctcgaacttctgggctcaagtgatctggcctctgcctcccaaagcactggaattacagatgtgaaccgccgcccacagccagcagttgtttaactaagatcgctctggtctctgtcctcatggagatagtccagtggggcagagagatactatagaataaactatacaattttgaaaaaatgcaggtaaagttcacataacagaatttaccattttatttattgttttgttttgtttaaacagggtctcactctgttgcccgggctggagtgcagtggtacgatcttggctaactgcaatctccacctcctgggttcaaacgattctcctacatcagcctcccgagtagctgggattacaggtgagcgccaccacacctggctaatttttgtatttttagtagacatggggtttcgccatgttggccaggctggtcttgaactcctggcctcaagtgatccacccacctcggcctcccaaagtgctgaggttacaggcttgagccactgtgcccagccagcatttaccattttacccatttaaaagtgtgcacttcagtggtttgtagtgcattcacggtgtgttgccactaccacctctaattccagaacagcctatcaccccaaaagacatcctgtccccatcagccatcactccctacccccttccccaccccccagcacccacgcatccccttcctgtctctgtgggtccacctgtcctggacatttcatagaaatgggatcacacggctgggtgtggtacctcacgcctgtaacctcagcactttgggaggctgaggcgggtggatcacctgaggtcaggagttcaagaccagcctgaccaacatggagaaatcccgcctctactaaaaatataaaattagccgggcgtggtggtgcatgcctgtaatgtcagctacttgggaggctgaggcaggagaatcacttgaacctgggaggtggcggttgcagtgagccgagatcatgccattgcactccagcctgggcaagaagagcgaaactgtgtaactccatctcaaaaagaaagaaagagagaaagaaagaaatagagagagaaggaaggaaggaaaggaaggaaaggaaaggaaaggaaagaaagaaagagagagaaggaaggaaggaaaggaaggaaaggaaaggaagaaaggaaagaaagaaatagaaggaaggaaggaaaggaagaaaggaaagaaagagaaagaagaaagagagaaaaagaaaggaaagaaagaggaagaaagaaggaaagaaaaagaaaagaaagagaaataagaaagaaagatgggctcacacactgcgtggcctttcgtgtctggcttctctcactgagcacgaggtcctcacagttcatccacgctgtggcctgggtcagaggctccttccttttcatggctaagtaatattccagtgtgtggatggaccatgctgtcctgatccatccttcagtagatacctgggttgcctccatgtcttggctattatgagcctgctgctctgagcttcatggacaggtccctgcatggatgtgtgtgtttttagttctcctgggtagacacttaggcgtggaattcctgggtcaaatggtggctccatgtttgacctttgtgagaaattgccaaataattcttcctcctcttcttcctcctcctcttcttcttcttcttcttcttcttcttcttcttcttcttcttcttcttcttcttcttcttctttcttcttcttcttcttcctcttcctcttctttttcttcttcttcttcttcttctttctcctcctccttctccttctccttctccttccccttcccttccccttctccttctccttttcttcttctttcttcttcctcttcttttttttgagatggagtcttgctctgtcgcccaggcttgagtccaggggcacaatctcagctcatggcaacctccgcctcccgggttcaagcgattctcctgcctcagcctcccgagtagctgggattacacgcacacgccaccacacccagctaatttttgtatttagtagagactgggttttgccatgttggccaggctggtcttgaactcctgacctcaggtgatctgcccaccttggcctcccaaattgctgggattacaggtgtgagccaccacgcccagccgccgaactgtttttcacagcggcattttcaccattttacattcccacgcactgttcatgagggttccgattggtccacaccttcacccacagttgctacacaatagattgattgattgattgattgattgattgattagagacagggtcttgctctactgcccaggctggagtgcagtggcacaatcatagctctctgcagtctcgaactcctagggcttaagtgatctccctgcctcagtctcccgagtagctgggactacaggcatgcgccaccatcctccacaaaattttttacattttttttgtaaagacggggtcttgctgtgttgcatgttgaaccaggctgggcaccgaagctcatgcgtgtaatctcagccctttgggaggctgaggcgggaggattgcctgaacccaggagtttaagaccatatgggcaacaaagagagaccctgtctctacaaaaaaaaatcaaacagactgggcgcagtggctcacgcctgtaatcccgcagtttgggaggctgaggtgggcagatcatgaggtaaggagtttgagaccagcctggccaacatgatgaaaccctgtctctactaaaaaaatacaaaaattagctgggcattgtgtcaggagcctgtaatcccagctacctgggaggccgaggcaggaaaatcgtttgaacccgggaggcggaggttgcagtgagccgagattgcatcatagcactccagcctgggccacagggcaaggctccaactcgaaaaaaaaaaaaaatcaaacaattagccaggtgtggtggtgcatgcctatggtcccagcttttcagaaggttgagacatgaggatcgcttgagcccaggaggtcaaggctgcagtgagctatgatcacgccactgcactccagcctgggcaacagagcaagatcctgtcaaaaaaaaaaaaaaaaaaaaagaatgttcaatcatataacactggtttaagcattttatgttttattttttgggtttttttttttttttttttttgagatggagtctcgctctgtcacccaggctggagtgcagtgacgtgatctcagctcactgcaagctccgtttcccaggttcacgccattctcctgcctcagcctcccgagtagctgggactacaggtgcccacgaccatgcccggctaatttttttgtatttttagtagagatggggtttcaccatgttggccaggatggtctccatctcctgacctcgtgatccactcgccttggcctcccaaagtgctgggattatgggcgtgagccaccgcacccggcaggggtttttttctgtttttttttttttttttttttttttttttttttttttttttaagacagagtctcgctctgtcacccaggctagagtgcagtgacacaatcttggctcactgcaacctccaactccctgcaacctctgcctcccgggttcaagcaaccctcctgcctcagcctcctgagtagctggaattacaggcgcctgccactgcacccagctaatttttgtatttttagtagagacggggtttcatcatgttggctaggctagtctcaaactcctgacctcagatgatccattggccttggtgtctcaaagtgctgggattacaggcatgagccaccacactcagcctggtttaagcattttatatgactcaactcatttaacccgccccaactccctgaggtatgttctgttaatagtatccccactttacaagttaattaaagcccagaaaggttaagggacctgcctgaggctgcacagcagtacttgaaccctggctctctggcattctcttagctgctgtgtagtggcccaaaatcaaatgtattagattagaattcaggttattgtttgaaataggccaatttaagcttttaaaatttaacccaatgttgttaaacatttagaatgtgcacccttaaaaatacaccaattctgggcacagtggctcacgcctgtaatcccagcactttgggaggccaaggcaggcagatcacttgaggtcaggaggttcgagaccagtctggccaaacatggtgaaaccccatctctattaaaaatataaaaattagctgggcacggtggctcacacctgtaatcccagcactttgggaggctgacacgggtggatcatgaggtcaggagatcgcgaccatcctggctaacacggtgaaaccctgtctctaccaaaaatacaaaaattggccgggcgtggtggcaggtgactgtagtcccagctactcgggaggctgaggcaggagaatggcgtgaacctgggaggcggagcttgcagtgagctgagatcatgccactgcacttcagcctgggtgacacagcaagactccatctcaaaaaataaataaataagtaagccaggcatggtggtgggcacctgtaatcccagctacttgggaggctgaggcaggagaatctcttgcacctgtgaggtggagtttgcattgagccaagattgtgccattgcactccagcctggacaacagagcaagactccatctcaaataaataaataaatattaaaaaataaaaataaaatacaccaattccgccactgagtgtctccttaagaatgagcaaggatgtgcttaggacagaggaacactagctatgctataagtgctcatctgaggcataggctaagtgacatgcagggtgcattagttaggtgttgctgcataacaatttacccatcccccagtctgtcagcttaaaacatacattattatctgacctacaccatttctgttgatcaggagtccaggactgatttagctgggtggttctggctcagggtctcatgagattgcaaactgtcagcagccaagtctgtcacatctgaaggttcgactggggctggaggagccactcctactctggctccctcatgtggctgttggtgggaggcctcagctctttgccacgtgtgaatctccatagtgctacttgagcatccttacaacatggtggctggtttttcctggagtgtgatccaaaagagagagacagagagagagagactgcactgactttttgtttgtttgttttgagacagggtctcgctctgttgcccaggctgaagtgcagtggcaccatcctagctcagtccagtcttgaaatcctgggctcaagagatccctctgagtagctgggtctacaaatgtgtgcgtcaccatgcccagtttattattttactttttggagtggcggggtctcactctattgcccaggctggtctcgaactcctgggctcaagcaagcctccccgctgggcctcccaaagtgctgggattacaggcgtgagccactgtgcccactgcaaacatttactcttcacaactctggtagcttccttttccccagagcatgctacagccacacagtaaagccttacgtctattgagcacctgctatgtgcagcttgtgatcaactctttttgtcctcaccacaaccaaccaacaacgtaggtttctattataattctcactttgccgatgagaaaacggaggggcaggtttgtggagaggaaaacccaaggccacacagttggtatgtggtggagccaggatttgaaactgcgacccgttaactcctgcctcggttcccctcccttctcattcactgcagggatcacagttataaccccctgcttatgtatgcgctggcttgtttgatgtctgtctacccaacataacctggcgggtttcatgacaggatggtatgagtgcacagtaagtgtgtttggctttgttttaatgttatggggttttttttttttaattatttacttattttgaaagagagtctcactctgtcacccaggctggagtgcagtggtgcggtatcagttcactgccacctccacctgttgggttcaagcaattctgctgcctaagcctcccgagtagctgaaaatacaggcatgggtcaccatgcccagctaatttttgtgtgtgtatgtgtgtgtgtgtgtgtgtgtgtgtgtgtgtgtgtgtatttttagtagagatggagtttccccatgttggccagattggtctcgaacccctgacctcagctgatccacccgcctcagcctcccaaatgctggaattacaggcttgagccgccacgcccagcctgtttttatgttgagacagggtctccctctgtcactcaggctggaatgcagtggcacaatcatagctcactgaagtctccaactccggggctcaagcaatcttcctgcttcagcctcccaagtacctgggactacagatgcataccatcacacctggctaatttttttcagtattttttgtagagacggggactagttatgttgcccaggctggtctcaaactcctgggctcaagcgatcctcctgccttggcctcccaaagtgctgggattacaggcatgagcccttacacctggctgaattttgtttttctgttccctgttgcctagcacatgatacctgcttaccattaataaatgcactaaaaacacaatggttgagtttagaaccagactgtcccaggtttgaaaccggtttataacattgaatggctgtgtgtccttgagccagcagctgaatcctctggggaccagtttttctctctctctctggaaaacgaggccaatccagctcacaaagcgttaatatgtataaagtccttcctggcccggagaaagcactgcagaagctttaaaataaatcagcccttaaaaattcactttccggctgggtgcggtggctcacgcctgtaatcccagcactttgggaggccaaagcgggcggatcacttgagatcaggagttcgagaccagcctggacaaaatggcaacccccccctccaactctactaaaaatgcaaaaattagccgggtgtggtggtgcgcacctgtaatctcagctactcgagaggctgaggcaggagaatcgcttgaacccgggaggcggcggttgcagtgagccgagttcccgccactgcactccagcttgggcgacagaatgagacttttttttaaaattactttccggatgctttcgctccagcgaccagcagggggcagcaaaaacccatgccttctttcaggctctgtgccttggcttgaaatgtgcaagatttattgagctcggagggagactgtgaggggactccctggcttctctcctgggacgcaaaagttgccccgtgcaaactttctagcctgcaaggtcggccccgctcctcctccccttttctctccagtaactgaatgtggtttggctgccaggcctttgcacgtgcggtttccctagcctggaacactctgttcccaccctggaggtcggagatgctgggttgggatggagacacccgtgacctgctaggcccagggcatggcgttagcaaaggtgggggtagaagtaggaattactggccgggcgcggtggctcacgcctgtaatcccagcacttcgggaggccgaggtgagtggatcacctgaggacgggagttcgagactagccagaccaacatggagaaaccccgtctctactgaaaatacaaaattagtcgggtgtggtggtgcatgcctgtaatcccagctactaaggaggctgaggccggagaatcgcttgaacctgggaggcggaggttgcggtgagccgagattgcgccactgcactccagcctgggcgacaagagtgaaacgccgtctaaaaaaaaaaaaaaaaaaaaaaaaaaaaagtaggaattacctaggtccgagttagaaaacagagagcccctcaactgtggcctcgaaaccacacagaggactgaagcaggatgtgtgggggtaaaactgagggccaaataggagctgagtcccgaccaagggagctggagttcctcacctctgggtcctcaatatttgctgattgacttaagacatgcatgcccttaagccttgcattctctctccaagcttcagtttcctcatctgtaagacggggctcatgagatatatatatatatatgtgtgtgtgtgtgtgtgtgtgtatatatatatatacacatacatatgtgtgtatatacatataatgtatatgtgtgtatatatgtatatatacgtgtgtatgtgtgtgtgtgtgtgtatacacataatttttggttggttgtttgagacggagtctcactctgtcacccaggctggagtgcagtggcgcgatctcagttcactgcaacctccgcctcccaggttcaagagattctgctgcctcagcctcccgagtagctgggattacaggtgcgcgccaccacacccggctaatttttgtatttttaatagagacagggtttcaccatattggtcaggctggtctcgaatccctgacctcttgatccgcccgcctcggccttcctgatccaaccgcctcggcctcccaaagtgctgggattacaggcgtgagccaccacgcccggcctgggctcaggttattatgcaaacatccagaactgggcagatcaagatgaatgataccaatgatactatcacattataggcaaaataggaccttctccccggtcagaaaagtgaactctcaggcatcactcctactggaatccagagtcaataaacatttatgaagcacctactgggtactaggagctgttgtagaaaggtactggggagaaggcagggaacgaaatgtacaaaaattctgaccacgtccatagtccctggccccgccccactacttgccccaaccctcacaggaacagtttccagccccgcccccagccccgcctcctctccaccccctcacttttctgaacctaccagagcgaggtgaagggtgagagtaatctacatattcatgagggatcagccaatccacagcctgaactcggatttgtcttcagagcctagctgattgtgacgtcaagagtgatgcattacgtagccgggcgccgtggctcatgcctgtaatcccagcactttgggaagccgcggagggcagatcacccgaggtcaggagttcaagatcagcctggccaatatggtgaaaccccgtctctactaaaaatacaaaaattagccgggtgtggtggcgagtgcctgtaatcccaactactcaggaggctgaggcaggaggatcgcttgaatccagaaggcggaggtggcagtgagtggagatcgtgccactgcactccagcctgggccacagagccagactccgtctcaaaaaaaataataataataataaagtgatgcattgcgtgatttttaaaggtgcagcaacctctcatggtctcagtttgcatatccgtaaagtacaggttggggcgtgcgggacatagaaaccagcgcagtacgatgacgctgaaatcgctttgccaccttgggtgaaattcagggatacgttttgagcgttcactacatgtcagacactttactccagcgggggctccggagttcctgcttagaatgggagcttcagcaccgggggtcgcggacagctcccggctctggtcgcaggggctcccatgcaggatgactggggacaagggtctgagctttctctgcctgtctgtcctccatcaaagcctcaaatgaactcagccctaatctctgacagctaaggggttgctagtcaggacaacactctgtccttggtccccaatcctgctcctccctcgtcgtctgcatctcagctgatggcagttccattctttttttttttttttttgagacggagtctcgctctgtcgcccaggctagagtgcagtggcgcgatctcggctcactgcaagctccgcctcccgggttcacaccattctcctgcctcagcctcccgagtagctgggactacaggtgcctgccaccacgcctggctaattttttgtatttttagtagagacggggtttcaccgtgttagccaggatggtctcgatctcctgacctcgtgatccgcctgcctcggccgcccaaagtgctgggattataggcgtgagccaccgcgcccggcccggcagttccattcttccgggtgctggagccgaatatcaacgctatcctggatcttttgtttcttgctcaactccaatctatcagcaggtcctgtcgcccctgccctcactattccatcctcaaacgctcacttcttcctgttcctctgcctgggtccagccccatcgttgcccacctggacctggcgcagttgcctctgccttggtcctaggctccaccctctgccacacagtctgtcctccctgcagcagccaccagaggggggctgtgagcacccgagttagggcctgtccctcctctgcctacagcactccaaggctcccaccttcctctgggtcaaagcctccctgtgacctataaggctggcaagaccttccctgtgttagccaggatggtctcgatctcctaacctcgtgatctgcctgcctcagcctcccaaagtgctgggattacaggcgtgagccaccacgcccagccaattttctgcattttgaatatatgtctgggtatgtctcttagaggatatttattctgtttggtgttttctgagcctcatggatctgtgaaaattattggctattctctgaaaacaatcagctgccctagtcttccttctcctgtgggattccaattacacctgtgttagatcacttgctcttcacctgcagctcttggatgctcttaacctgtctttaacacctctctaattcttgcttttctttttttacaaacagagcaggcttcaggcttgatgtttggttagactatgataaggttgaggaggtttttgttgcatttatctttggacctgccctcaattcacggcagactgtagtgcgggggaggcgttattcttttctctttaaatatatctaagtcttttaaaacaaacagtttgatccaaagaaaaatcttcactaatacttggacacagataaaacgagaagggtggtctgtgagtgacagcattgagaggctgccctaatctggcttgttggtttttcagctagggaaactgaggcatggagtgggtaaagacttgtagaccaggccgggtgtggtggctcacacctgtaatcccagcactctgggaggccgaggcaagtggatcacctgaggtcaggagtttgagaccagcctggccaacatggcgaaaccccatctctactgaaaatacaaaattagccgggcgtggcagcaggtgcctgtaatcccagctacttgggaggctgaggcaggagaattgtttgaacctgggaggtggagggtgcggtgagctgagatcgcaccattgcactccagcctaggcatcaagagtgaaactccatctaaaaaacaaaaaaagacgtgtagacctgggccttctgtccttggtacggggggacaggaaccggggttgggggtgtggtgcagatggaggatcctcacgaagatccaggtgctggcccagcgcagcagctgctgcagttttgatcactgggctgaccctcttgggcctcagttctcagagtggaaaatgtggctggtcaatcgggtgtctctggtgggggcataggctgtgctacacagtggacggtccacagcccaccccgttgactgtgcacggctgggtggcttgtctttcccatctgtctttctcactgtctctctctctccctaactctctccctctctgtctcattatctctgtatctctgtctttctctatcactgtttccctctaaatcttgctgtctctccttgtctctgtatctttgtctctgtctctctcccctctatctctctctttcactctttctgcatgtctttgtgtgtctctgtctttccctgcctctctgttcatgtctgtttctctgcctctcatctctgtctttttccgtgatgtctctctgtttctttctcttcctccctctctctccctttctgtctcttctctctatccctctctctctcttcctccctctctccctttctccctctccctctttccttcttccccctccctccctccatccctctctccctccctccatctctctctcctcccttctctctctccctccctccatccctctctccctccctccatctctctctctccctccctccctccctgtctccatgtctcttcctctctctccatctctcattctctctccccttctccctccctcctttcatctctctctccccttccctccctccctctctctccccctccctctctttatctctctctccctctctccatctccctctctttctctctccctccctccctccatctctctctccctctttccatctctctctccatctctgtctcatctctctccatctctccatctctccatttctccatctatctctccatctctctatctccatctctctcttcatctctctctccatctctctatctgcctctgcatctctccatctatctccatctctctcttcttctctctctccatctctccatctctctctccatctctccatctctctatctccgtctctgtcttcatctctccatctctctccatctctgtcaatctctctctccatctctctccatctctctctcattctctttcccccttctccctccctcctttcatctctctctccccttccctccctccctctctcttcccctccctccctttatctctctctccctctctccatctctctgtctctcattctgtctccctccctccctccatctctccctccctccctctctccctccctctctccatctctccttccctctctccctccctctctccatctctctctccctctttccatctctctttccatctctctctctccatttctccatctctctctccatcactctctctccatttctccatctctctctccatcactctctcattctctctcccccttctccctccctcctttcatctctctctccccttccctccctccctctctccccctccctccctttatctctgtctctccctctctgtcattctctctccctccctctctccatctctctctctccctctctccatctctctctccatctctccatctctccctctatctccctgtctccatctctccatctccctctccatatctctctctctctctctctctctctctctctctctctctctctccctctctccatctctctctccatctctccatctctccctctatctccctgtctccatctctccatctccctctccatatctctctctctctctctctctctctctctctctctctctctctctcccttcccgtttgaaggttgcctcccacatctgccttccgccaaggcccgggctctgacccgccgtctgaatgcctgactccaaccgcacatctgtggggtaattgtctcctacgaccacaaggtactgaggcaaattatagttacggggcgggggcctccatgtgggcgaactgcgtccgctgggccgggctctgccggcctcagctgggcaggatgaccgaggcatggccccactagggtcaggaaagctcacgcccagcccttcccctcgcccctccccacacaccagccagtcctttgccaggcctccatctttagtgccaggatgaaaatgccttttgcaaaaatcagcaggaaactccaatatttgcaaaaccctgactttctattcatgcatacattcctgcattcaacagatctgttacggagcgcctactctgagccaggcactgttccaggcactgaggccaaagcagtgaatgagaccaacacaattctcggccctcctgaaatcaacaccccactgggggagacaggcaagaaatagggaatagtcatcagtgctttgaagaaaaagcaggaaagtgatcttgggggcccaggggagttattttattttattttattttatttattttattttatttatttgagacggagtctcactctgtcgctaggctggagtgcaatggcgcgatctcgggtccctgcaacctccgcctcctgggttcaagtgattctcctgcctcagcctcctgagtagctgggattacagatgcatgccaccacacccagccaagttttgtattattagtagacacgggtttcaccatattggccaggttggtctctgtctcttgacctcgtgatccgcctgtcttggcctcccaaagtactgggattacaggcttgagttaccacgcccagctattttattttatttttattttgagacagagtctcgctctgtcacccagggtggagtgcagtggcacgatcttggctcactgcaacctctgcctcctggattcaaacaatcctcctgcctcagcctcccgactagctgggattacaggcgtgcaccaccacgtccggctaatttttgtatttttagtagagatggggttttgccatgttggccaggctggtctcgaactcctggcctcaaaggacccacccgcctcggcctcccaaagtgctgggattacaggtgtgagccactgcacccggccaagccattgctattaatatcgatgattcaaatgatagggtctctcccatacacctgccctgtcaagcatcataggtgcttactgtgtgcacagctgagtcccaggggatgccggggtcccggtgagggttcagacccgggccctgccctccaggagccccccaggctgggggaggctgtactggatgcagacaatctcaatcccttggggttaaggctgggtcttgtgggaaccttcctatcgagcagaatgtggctgctaatccaggcttttcagggtggaaactcagagcctgtggtccagacagtgggcgtggcgtggctgggtgtctcgccttcctctctctgtctctctccaaccttctccccatctctgtccctccatttgtctctgtgtctgtttgcctttgtctctgtcctcaagggttggggcaatgtctgggctgggttttgacagatgcataggagttgctcagcggtgcaaagaggaaaggcatcccaggcagaagcaaaggcccggagctgtagaagaacgtggtgtcatcaggaagtgggacggtgacatgcattagtgagagaagggggatgagtgggaagccgggtccagtcgccgtcgggttcttatgttggagaccatgaagggaggccaagagaggagggaaccagccacagctgcactttaggaagattcctccacggtgccggggactgagcagaggagacgagactggggtggccacgttccccagcacgccaccccgtcctcagccccaatgacacagcgaggcgcctggtccccattcatgtcctgcgccagctgctcagcctccacttccctccgagcactcggagaggacacagaaaagcagaggccagaggagttccgggtgggccctgtcattgccatgtcagagctaaggggcagtccctccccagggaagttcttcctgcagtctatctgcagtccctcctgctacctgcgggccaggacatccagcccccacatacacaccagtgaccagccccttctcgcctcacccgggcatacacttcatgctccataaatgcacagcgactgttacattatgaaacaaaaggaacccccccaccccctaccacccaaaccccccaacttgtctctgcttggaggccaggagaaggaaggagaagataaaatagtgacagtcacgccgggagcagtggctcgcgcctgtagtcccagcactttgggaggccgaggcgggcagatcacctgaggtcaggagtttgagaccagcctggccaacatggcaaaactccatctctactaaaaatacaaaaattagccaggtgtggtggccaggtgcctgtaatcccagctacccgggaggctgtggcaggagaattgcttgaacctgagaggcggaggttgcagtgagccgagattgcgccactgcactccagcctgggcaacaagagtgaaactctgtctcaaaaaaaaaaaaaaaagacttacccctccagggtcccatgaagacagccgagccctgcccggagctaacggaggccttggagcacgctcacaggggcaccctcccggctggcatctgggaagcggaggtgggtgggtgttgcgggggggggggtcggtgggggggggcgttccccctcccgccccaggctgccgggtcctgcgcatccgtctgtccctgatggaggtggtgggcaggcgggagaagccacgctccttccggggggcgggaggggggattttccaatcagagtttgagcttcattcacaaatccatggccccgtctgattgcaccaacggctgctgcacacacacacacacacacacacacacacacacacacacggcctgtgacagcctcgccgggctgtgggtggtcacttagttgagagtggcctggtgtgtctcacattaacgcatcccaagccctcctgcctctctctcttctctcttctctcctctctctctgtctctctttctctctctctctctctctctcactctctcgtctatgctctccagctcccagtgtccccggcaccctcctccgactccccagagaaaagctgcttgtgtgacggcatcatggaagccgggtgcccggacctgcctcccaggcggccggcccagcccgcactccggtccccataaggcgattcggggccgccctcgccgtccgccccagcatggaggtgcccgggccccccgtgtccagcaagccgggagagacctcggtcaaatggcaactgtgctacgacacgacggctaaaatgtggtggatggtgagtggagcggggcccgccgtggcccggggccgggggcaggagggggcggccggccgaggaggcttctccagccaggcgtggttggggggcggcggtgacccccccactggggagctgtgaagtcggggaaggtggtcagaggtggtgaaaccgagcccagatcatggagagcagaataattcttgcatcttccacctggagacgagtccgcggctgcccaggcaccgctaagggcccgaaagtgcctgtttctgtggcccacgagggcaccagggtggccgttcccttggacggttttgcagaggatcagtggtcctggagatgcttgtgctgggcccagggcctgtgatgggatgttctgagggtggggaggtctcagcgggctggggagcgtgaggcccagggactgggctgctgtgtgaccccggccaagccctcgcctgcctctgtgccctgtggtcccagaaaacggggtggacaccctcctcgctctggctggatgatggccaagggccgagggaaggtggggtggggctgtcgcctgctttggcccagaggaggactatggcatcacccctaagattgggcacccttccggaagcttccagtggtggtggtggggggtggttaaggccacgtcccttgaaactgggacccaccggatggggtaagaagcaattccggggcagctctgtgtgtaagacagggcacagttatggagcctggctgggggccagtgtccacggcccttggggtccgcgcgagaccgtcacactgtccgcctctcagtccgtcggtccatccagctgtctgggagctggccggtgatccatggggaacttgaaaacccgtcaacacaggtctgcatcatgcagatgtgtgtttcaacctgggcttactgtgtgaccttgggacagtggctcaccctctctggcccgcaggttctcccatcagggaaatgatgagcggcctagacttctcgggtttcatggcaggtgctctgtgggtcgccaaggaaagttgggcctcgaggtgggacatggcacctcatgacctgctgtgacctctcatagctgctgtctctggggtgtgtctgcttcaggtggggtcagagcctctggggtcatttccttagtctctgagcaccaaagtcttggggtttacaaggacagagagacctttcccacagccctggggagtgtcctgcattggtttcacttttcattcttcatacaaccaacatttgagtactcgctgtaccccaggccccatttctccatacgggggacacagcagtgacccagacaggaaaaaaaaagtccctgccttcttggggcaaatgtcccagagcgggagacagaggataaaaatatctgtgcacaaagtaggagtgaactacgattgtaggaggaagcagtgagaaggcgctgggggcctgagtgagcccaggcaatctgggagggctttcctgaggaggtgacatctgacctgagacctggtggatgacagaattcattcagataagagaaatgggaatagagttccaggcatgggtcgtggcatgtggaaaggccctggggcaggaccacatctggcctgttggaggaacagcgaggaggcctgtgtggctggaccagagtgaggagggggagaaagggaggaggagagggcagggaagggacggggcaggtcacgcagacctgatggcctctgggaggacttgggctgtgacaccgaggaaggtgggagccatggagggctgcgggcagaggagggacgggacctattttatatttttaaagcttccttgggcttctgtggggagaaagggtggctggggctgatgtggcagccagagaccaggggaggctgaggcggcttctaggcgagggatgatggggacttggaggtgcagggaagggagcaggtttcagatgaaaaaaggctgggacttggcaattaaactgaaggcccagagaagctgagtgatttgctcaaagtcacccagcaagtgaagaacagagctgggagtgggagaagggcctgaggtcagaggtcagaggtgggggaggtggggagcccttcctcatctccatctcctgggtccttagcgagccaagcagaactggcagtttgagaaaaggagaacatttcagtgcaaacttgaggtcttatcaatagaggtagaagccccagtataggggaggttatggacccactcattagtcaaggggaggtatcaaaccggagtatgtccagacagggaaagcggatagggcagccttcagggaaagactgagagactcagggctttagcccaagaaaagaagatgcctaggggtggaattcagttcagctctccaagctctccctgacatttctctggcattggctcagagctgggtcacctgcgccctcccacaggatcaaccacacattcagggggttcccaaacacaagagctgaagcagcaggacccaagattcaggactcaaaatctccctaggcggggcttccctagggcagaagaagctaaagagggcagagggcagagcctggcctctgcagggatcagcttgacctctgtaagtgctttctcctgagtgtgtgaaaggtaatgaggcatccgtcacaggaggcatgcaagcctctgttggtggaaattccattcttttttttttctttttgagatgaagtatcactctgttgcccaggctgtaatgcagtggcgcgatctcggcccactgcaacctccgcctcctgggttcaagcgattctcctgcctcagcctcccaagtagctgggattacaggcatgcaccaccatgcctggtgaatttttgtatttttagtagagacgaggtttcaccatgttgaccaggctggtcttgaactcctggcctcaggtgatctgcccccttggcctcccaaagtgccggtattgcaggcgtgagtcactgtacccagcctccattctttttttttttttttttttttttgagacggagttttgctcttttcatccaagctggagtgcaatggcacaatctcggctcaccgcaagctccgcctcccgggttcaagcaattctcctgcctcagcctcccaagtagctgggattacaggtgcacgccatcacgcccggctaattttttgtatttttagtagaaacagggtttcaccatgttagccagcacaccacaggctggtgtcgaactcctgacctggtgggctgagatgatcgcccacctcagcctcccaaagtactgggattacaggcgtgagtcactgcacccagccccagcctccattcttttaaatagagtggaccaggtgattttcaaaagatgcttttacactcagagcagccaggctcccaaggcgaatgaaggatccacgaaggattcaaaatgtggggctggatggagagagaggatactgggcgggcgttcaaccttagcctctaaatcccaaggcagagttaacatctcccagagctacaggaggcacagcacagggctcctgagacctttagggctcatggaaatatttccattttaatgtatcgtataactatgataataatgaatacatggttatgcatcccgtctggattctattcatctgtgtgcccatgcagccataaaagataaatttgtttgtttctttctgagacagagtctcgctctgtcacccaggctggagtgcagtggcacgatcttggcccactgtaatctctgtctcccaagttcaagcgattctcctgcctcagcctcccgagtagctgggattacgggcgcccgccaccacgcctgggtaaattttgtatttttagtagagatgggttctcgccatgttggccaggctggtcttgaactcctgacctcaggtgatccacccgcctcagtctcccaaagtgctgggattacaggcatgagccactgcacccagcccataaaagatcattttaaacaattctattttttgtgaaggaaagagcccacaaaaacaaaagttcccctggcctgggaaaatcataaggtagctaagttcatccatttatctgttcattcattccaagaacaagtcatggcagggcagtcgctcacaactttaatcctaacactttggaaggctgagatgggaggatcctttgagcccaggagttcaagaccagccggggcaacatgacgaaaccccatctctacaaaaaaatatgaaaattagtcaggcgtgatggtgcatgcatgtaatcccagctactcaggaggctgaggtgggaggatcgcctgaacccaggaggttgaggccatggtgagccatgattgtgccactgcactccagcctgggcaacggagtgaaaccctgtctctagaaacaaacagacaaacacacacacacacacacacacacacacagagaccaggcacggtggctcatgcctgtaatcctagcactttcagaggctgaggcaggtgaatcatgaggtcaggagttcaagaccagcctggccaacatggcgaaaccccgtcgctactaaaaatacaaaaattagccgggggtggtggtgggtgcctgtagtcccagctactcaggaggctgaggcaggagactcgcttgaacccaggaggcggaggttgcagtgagccgagatcccaccactgcactccagcctgggtgacagagcgaggctccatctcaaaaaagaagaaaaaaaaaaacagaaaaagaacaagtcacgtcagctctctgtgcctcagtttcctcatctgtaaagcaggcggaggtatgcacagcagagccccccttccccccagtagggtctttgtgggaaatccaatatgctgatgaccacggaggtatcttgcaaactgttaagggccctgcccaggtcaggaactgagtaatagtcacaaagataaagcgagagagattgtggttagattccagaaggacttccgtggtggctccacatgcgccatgagtgcctattacgagtccgcggtgaaccagagagacccagccctgcccttcctgggctcctggcccggcatggagaacagtaaaagagaaaatgaataatgcatgagataattttaaattgagaggaggacggtgaagaaattagaagaggcagccagtgggccgggaaggtgacgttgcggcctgagccatctcaagggacctaaagtcttggtgggggcagagggcatggcccgtgcaaaggccccgaggcaggactgggctggtgcgttagaggaatggccaggaggcccatgtggctggagcagagtgaggagggagagagagggagaaggggagggtagggaggggatgggcaggttgtgcagggcactgtggcctccggggtggatgtggtgtttgggaccagaaaccctagggagccatggagggttgtgggcagagagggcctcccccatccactgagtggttccctgtgcccatccgtgagtgccacccgccacctccccctctgtgtgcccggcgctggtggggggcctcgagatgcttcgtctccccagccccctggcccgcgcccgcccggccgccgcccactctgcccacatctgaggcgcctaggagccggacagtctgccgcaaaccacggaatgtttcccggagcgccgggccgggaatgtcggcggtgaggaggggaagggtggggagacccagagagatgggccggggcggtgggcaccgccacgcgagggacgcagaatcattgtcaccctcaaccccagagaggggccaccacgatgccgccgctttacagatggggaaactgaggcacggagtggcgaagcgactttctatgtccacagggcttgggagaggcagcgctgggattcgaacccagacttcctggccacagacctcaggggcttgcccactaacccacagcaaagaggtcagcgggaactcagtgaatgaataaatgaatgaatgaatgggttttgtaagtgagtgaatgaaggctcattcactccgcccagccaggcctcccaccccagccacagaccaagcagaacatgctgaaacacaccagcccccatcctccagttcccaccactcccactaccatctggaagtccctccttgtatccgacctaggtctttcctcactcttttcttctccagggcagataaatggcaaggcgttcacaccctcccctgcaagccgctgagtctgtccctccaggagaagggcagagcccagccactgctcaccctggaagtcactggggaagggacagttgaggctcagagaggggcagtactttccccaaggtcacacagcaaattcttgtaacgtcagagccctgaacgattcctgagatgacgcccaattagagtcatggccggctgagcctcccatgttgtatctccttcaatcctcccaacaagtcgatagggaaggaaccattattatcaccattttatagatggggaaactgaggcttggcaaggggcagccgctgcaggaggtggccgggaagcgaccagggtaatgtggccactctctggatcagctgagcagagggaccaacttgttactctgccacctgtgatgggggtgatatgaagccatggctgccaggggtcatatcacccaggtgtcgtgtgtctaccccagccacacgctaagtcctcatagctgcctggccacgtggtttcgcccacctttgcagctggtggctttgcaaggttccatgaaacccctagcagggcggaggcaccttgtcctttgatagaaacccactgggcagggagaagccactggctaggggctccctggagatggtgacatttgagccaggcccagagggatgctaaagctttcaacacaagaaggtagcagggagggcattcctggcagaaggaactgctcagacaaaggtgtggtggtgcgaatgtgcccccgtgtgacagagctaaaatggggcctgaggcgggggcaggtaagagagacatgtaaagccaggctgtgatgggtgggtctcaaatgcgaggctgcggaggtggggctttctctccagggtaatggggagccatgggaggtgtctgagcgaacaggaccagagggacagatgggagagaggatctaaggggagagtgagcagatgttgggatggacagactatggggagccaggaggagggagaagatggggctgatgccagagatccctacctcagggatggggagtgatggtggaattgtccctgacatggggacatggaaggaggagggggtttgaggaagacgctgagtctggagaccttgaggaaagtcctggaagaagctgaataagggagagagatcgctggagtctaagataatgactagaacatctgtgatcagtaactgcttgtgaattggatggagggagggagggaggagtcgataggtgggtgggttgatgggtggacagatggatgagtggatggctagatgaggggatagatgggtgggcaggtgggtgggtggatggatagatgagtagagtgatggatggatggatggatggatggatgggagggaggtggatggatggatggattgataagtggttggatggttggatggatggatgagtggatggatggatgagtggatgagtggatggatgagtggagagatgaatcaatggctggatggatggacggatggatggatgaatgggcaaacggatgggtaggtggatggttgcatggatgaatggatggatgaatgcatggatggatgggtgggtggatggatggatggatggatggatggatggatgggtggatgaatggaaggatggttgagtgtatggctgagtgagtgaatggatgagtggagagatgaatggatgggctgatggatggatgcaggcatgggtggatggacagacgaatgggcaaatggatgggtacatggatgcatggatgaacgaatgcatggatggatgggtggatggatggatgagtagagggatggatgggtggatgggtgaatggatgggaaggtggatggatagatggataaagggatgaagggagtggtggatagatggatggatggatggatggatgaatagagggaaggatgggtgaatggatgggaaggtggatggatagatggacaaagggatgaagggagtggtggacagatggatggatggatggatagagggatggatgggtggatgggtgaatggatgggaaggtggatagatagatggataaagggctgaagggagtggttgatagatggatggatggttggttggctgcatgtgtgggtggatcaatgggtaggtggagcctgaagacagaagtggctgccctgagtgtgaaggcaaaggcacagccctgggaagcccccacatcagggccaggaagaggagatttggggaggaagcaggaactgtgccagttgcccctgtaactgcctctctgtgaggcctccccacccaagtcctttcctctacccctcttccccagaaatggctttgggacttgaaatccccgccccccgccccacaccccaccacacacacacacatggctcagctctggggggcctaccgcagacaaatcagtggaaaattaaaatagtgcctgtgcactggtgatcggcggcttcagccgggcacttaatgatccctttctggggattgttaccagctggaggtggcgggggggtggggggtcttcaccagccacccaatctgagcagtagggggtggtccctgggagagggggtgcagcccacaaagccagaagttggcagtgatggcaaagctgggaagggcttaggcagggaaagggatgaccttgagctccggggatgaacccacttggacccctgcacccctgtggcccctgctgggacgtcctttctctctcagtttggctagatggctccagctcatcttgtagttctcaggtccaatgtcaccacctccaggaagccctcctggactaggtcaaatcccctcagaagtatctaaccatccttatctataatcctatttgcctggaggccttgagagcaaaacctcactttgccacattagctgtgtgtccttggggaagtcactttccccctctgtggcttgttttcctcatttgtaaaataaggctgttaggagaattttttttcttttttagagacaggatgtgactctgtcatccaggctggagtgcggtggcacgatcacagttcactgcagcctcaaattccctgggttcaagcgatcctcccacctcagcctcccaagtagctgagactacaagtgtatgccaccatgcttggctaattttttagtagagatgggaggtctcagtatgttgcccaggctggtctcgaactcctgacctcaagtgatcctcccgcctcggcctcccaaagggcggaattacaggcatgagccatctcgctgggcccctgttgggaggattaaatgaacaattgtgggtaaactggtatttactgagcctttattatgtactgggcacagggttgaatctggtcctcaaattctcaaaataagccaatcaatgccagcaagatgttcatccccattttagggagagagtcactgaggcccctaggaatgagataaattcacttaataccgtcactgtgtgcccggaccagttcagttccctctgctctcacccctcacagtctgtcctccccacagcagccaccagagggcgcctgtgagcacctggatcaggtcctgtccctcctctacctacaaccctccatggctcctacctccctcagggtcaaagcccaagtcctccccatggtccacatgacctgccccatcctctccctgccctcccttcttccctctcttcccactaactctctctgctgcagccacacgggcctccttgctgttcctccaacatgccaggcgtggtcctgccccagggcctttgcacaggctgtgccttctgctcaagatgcccttccacctccccttagacaaactggctgtgcctcctccatctggcctcaactcaaatggcatccagaacacccctcccccaactaaaggaggtcctcctgctgtagtgtctgacccagccccattcttgtgaatgtaacagacacacacacacacacacacacacacacacacacacacacacacacacacactgcagtcatgctgtatgtgacttggcaggcgtctctgttcctcactcaactgcagggagggagatacttctgtcctagccttctcagggcctctagcaccccacatcagagagcatggctcataattggcactgaaggaccaggcgcagtagctcacacctgtagtcccagcagtttgggaggccgaggcaggtggatcacctgaggtcaggagtttgagagcagcctgaccaacatggtgaaaccccatctctactaaaaatacaaaaattagcttaaaaatacaaaaattagctgggtgtggtggcaggcaagtgtaatcccatctacttggggggctgaagcaggagaatcacttgaacctgggaggtgaaagttgtagtgagccgagatcgtgctgctgcactctagcctgggtgacaagagtgagactcccatctaaaaaaaaaaaatctctatcagtatggatttgtacagattaatgttatactttggtttctaatccaattatgtgtacacacacacacattatatatatatcctcaacaacagcaaacattatagaaatatttgcaatgtacttgcaaaagaattttactgggcaacaaatatgtaaagagttcctacaaatcaataagaaaagatcaactgaaaaaatatgcaaaggatatgaacacatcaccacagaaaatacctaaaagtaataaaaatggactttaaatctgtgagaaaatggctgggcacagtgcctcacacctgtaatcccaggactttgggtggccgagttgggaggattccttgagctcaggagtttgagaccagcctgggaaacatggtgaaaccctgtctccacaaaaaatacagagattagccaggtatagtggctcatgactgtagtcccagctgctcaggaggctgacgcaggagaatcacttaaacccgggaggcggaggttacagtaagtcgagatcacgctattacactccagtgttgggcaacagagagagaccctgtctcaaaaataaataataaaaaatagataaataaattaattaaaatatatgagaaaatgttcaccctgattcataggaaggtagattcaagttaaaactacaataaggctaggtgtagtggctcacaccgataatcccaacactttggaagactgacacaggaagactgcttgaggcgaggagctcaagaccagccggggcaacatagggagatcgtggctctataaatatggggtgcggttgctcatgcctgtaatctcagcattttgggaggccgaggtgggtggatcacctgaggtcaggagttcgagaccagcctggtcaacatggtgaaaccctgtctctactaaagatacaaaaattagctgggcatagtggtgggcacctgtaatcccaactactcgggaggctgaggcaggagaatcacttgaacctgggaggcagaagttgcagtgagccacgattatgccattgaactccagcctgggcaacaagagtgacactctgtctcaaaataaaataaataaataaatatatatatgtatatgtatatgtgtgtgtgtgtgtgtgtgtgtgtgtgtgtgtgtgtgtatattaagactgagtgctgtggctcacacctgtaatcccagcactttgggaggccaaggtgggcggatcacctgaggccaggaatttgagaccggcctggccaacatggcgaaatcccatctccactaaaaacacaaaaattatctgggtgtggtggcaggcgactgtaatcccagctactcgggaggctgaggcaggagaatcgctagaacctgggaggtggaggttgcagtgagccgggatggcaccactgcactccacccagcctgggcagagccaggctccatcaaaaaaaaagaaaaaagaatattcagtgccacctagtttgtggcgggaaaagactggaaataaacagaataagcattgagaggcacttttctttttttttgtaagcgatgcatccgtgcaataaatcgctgcagcattattagccattctgatgggcagccctctgaaatttaagtgatgaacggccgcgatgcttgtggttgtcactagagggaagcacatgaccatgaaagcttcttctatgaccgtctcaaattattgaagggtttatcctgtgattttcattcttcggttcctttcttttcccttttatttaccccatgcatttctatccgttttcttctttttctttttctctttctttcttttccttccttctttcttttttctttctctctctctctttctttctttctttttaaatttttttattttttgagacggagtctcactctgtctcccaggctggagtgcaatggtgcaatcttggctcattgcaacccccacctcctgggttcaaacgattctcctgcctcagcctctggagtaggtgggattacaggtgcctgccaccacgcccggctaattttttttgtttgtttttgtttttttttttagacggagtctccctctgtcgcccaggctggagtgcagtggcacgatctcggctcactgcaagctccgcctcctgggttcacgccattctcctgcctcagcctcccgagtagctgggaccacaggcgcccgccaccacgcccagctaattttttgtatatttagtagagacggggtttcaccgtgttagccaggatggtctcgatctcctgacctcgtgatccgcatgcctcggcctcccaaagtgctgggattacaggtgtgagccaccgcgcccggcctagatacaggattttgccatgttgtccaggctggtctcaaactcctgacctcaagtgatcccccagcctcagcctcccaaagtgctggcattacaggtatgagctaccgtgcccatattaactgttttttgttttttgttttttgtttttaagatggagtctggctctgtcacccaggctggagtatggtggtgcaatctcggctcactgaaacttccgtctcccaggttcaagcaattcttgtgcctcagcctcccaagtagctgggactacatgcgcacaccaccatgcctggctaatttttatattttttagtacagatggggtttcaccatgtttcccaggctgttctcgaactcctgacctcaagtgatccacccgccttggcttcccaaagtgctgggattacaggtgtgagccaccacacccggccctgtattaacttttgatagatattcaacctacaaataggaaagtatatctagtataaaggtacagctcaaaaattgtcccaaaccaaacacatttatgatttgtgtaatcaggtccctgaactcatcaagaaaaataatatttctgcttcccccaccacccacaaagtcaccctgatcctcccccttggtctctaactttcccatggttaagcactggcccgatttctgtcttcataaattagtacagggcacagtggctgacatctgtaaccccagcactttcggaggctgaagcagaaggatcacttgaggccaggagttaaagatccgcctgggcaacacagtgagacccaaaacgtgaacatatgtttatctcaaacataaataacaaagtaaattaatcaatcagtactgcccactgtgaactacattacactaaatcccataatgacaggctttttgtcctcaacgtaaagcttgtaagattcatctgtgttgttaaatgtttttgtaggttgaatatcagcaaattttttcttgtaaaaggccgtatcgtaaatattttaggctttgtggaccaggcagtccccattgcagctactcacctctgtccctgtagtcaataggcagccacagacaatatgtaagtgagtgggtgtgggtgtgtataccaataaaactttatttataaaaataagtgatgggctgtgtgttagtcagggttctcaaacagaaccaatggggagtgtttgtgtgtgtgagagacagagagacagagagagagtgattttaaggaattgtggagtgcagtggctcacgcctataatcccagcactttgggaggctggggcaggaggatctcttgagcccaagagtttgagaccaccctgggcagcatggtatcctcatctctaaaaacaaacaaacaaacaaattaataaataaataaaatacatttgccaggtgtggtggtacacacctgtagtcccagctagttgggaagctgaggcagagttgaacccaggaactcaaggctgcagtgagctgtgatcacaccactgcactcaagcctgggtgacagcacaagatcccgtctaaaaaaaaaaaaagaaagaaaagaaaagaaaaagaaaaaaaattgatttgcttgatatgggggctagccagtctaaaatttatagaacagggcagcaggctagacattcaggtaagagtcaatgttgcaggccgggcgcggtggcccacgcctgtaatcccagcactttgggaggccaaggcgggcagatcacgaggtcaggagttcaagaccagcctggtcaacatggcgaaaccctgtctctactaaaaatacaaaaattaaccgggcagccaaggcacaagaattgtttgaaacccaggaggcagaggttgcagtgagccgagattgcaccactgaactccaccttgggcaacagaatgagtccccgtctccaaaaaaaaaagaaaaccaaaaacaaaaacaaaaaaaaaaacagaaatagagtcagtgttgcagtgttgggtccaaaaactgtagggcagtccccacagtctggaaacgaggactttttttttttctttttttttttttatggagtctcgctgtgttacccagcctggagtgcagtggcgcgatctctgctcactgcaagctccacctcccgggttcaagcgattctccagcttagcctcccgagtagctgggactacaggcacacgccgccacgcccggctaatttttttgtatttcaggaaagacggggtttcactgtgttgcccaggctggtctcgaactcctgagctcaggcaatcatctgcctcggcttcccaaagtgctgggattacaggcatgagccaccgtgcctgaagaaatgaggatttttatgtcccagtcttgaggcagaattccttcttctctgggaaaacccgaattttgctcttacatccttcaactgattggacgaggcccactcacattacagagggtcgtttccttcacttaaaggcagctgactctagacattcagcacatctgcagaataccttcagagcaaaacatgcagatgcctgttggagcaaacaaccgggcagcatggtctcgccccatggccccatgcaatcaaacatcacagtctggatttgatccggggccatggtttgacagctccagtgttgttcacgtgttcctgggcttaggatgggaccatgtcctgataaactcttcataagttaaaaatatcataagtcggccgggtgcggtggctcatgcctgtaatctcagcactctgggaggcttagacgggtggatcacctgagctcaggagttcgagaccatcccaatcaacatggtgaaaccctgcctctactaaaatacaaaaaattagccgggcgtggtggtgtgtgcctatagtcccagctactcaggaggctgaagtgggagaatcacttgaacctgggaggcagaggttacagtgagccgagattgtgccactgcactccagcccaggtgacagagcgagactccatctcaaaaaaataaaatcataactcaaaaatgcatttaagctgggtgcagtggctcatacctatattcccagcattttgggaagctgaggtgggaggatcacttgaggccaggagttcaagagcaacctgaataacatcataaaaccccatcttggccgggcacagtggctcatgtctgtaattgcagcactttgggaggccaaggcaggtgaatcacctgaggtcaggagtttgagaccagcctggccaacatgatgaaaccccgactctactaaaaatacaaaaattagccaggtgtggtggtgcacacctgttatcctggctactcaggaggctgaagcaggagaatcacttgaaccccagaggcagaagctgcagtgagccaggatcaccctgctgcactccagcctgggcaactgagtgagactctatctttaaaaaaaagaaaaagaaaaaaacgtatgttggaatcatctgtcttcgtttcctgggccttccttaacaaagtagcacagcttgagtggctcaaacaacagaaatgtatttcctgacggttctgggggctggaagttcaaattcaaggtgttggcagggttgattcctcctgagggctggcagggagagtctgtcccacccttctctgtccttgacctgtaagatgacgccttcatgtacacgtgacggtgtccctaagtgcatgtctgtgtccaaattttccccctttttataaggacaccaatcagtttggattaggatctggactaatggcctcattttttttcttttttttttagacggggtctcgctctgtcacccaggctggagtgcagtggcgtgatctcggctcactacaagctctgcctcccgggttcacaccattctcctgcctcagcctcccgagtagctgggactacaggcgcccgcctccatgcccggctaattttttgtatttttagtagagacggggtttcaccgtgttagccaggatggtctcgatctcctgacctcgtgatccacccgcctcggccgcccaaagtgctgggattacaggcgtgagccatcgtgcctggcctctaatggcctcattttattttgattacctctgtaaagaccctgcatcctaataaagtcaccttctgaggtcctggggttagaacttcaacatatgaatttggggggcagcacaattcaatgcataatcaccctgttgtccatgtaggttttcttttttttcattcctgtttccacccattctagtgtggatgttcatttcaattagttccagttctgggctcttacaaataaaaccgatatgaacatttccatgcatgtctttcagtatatacatgtgcccttccttccttccttccctccttccttctttccttcccgtccttccttctttccttctttccttccttgcttcctaccttctttccttccttccttccctccttctttccttccttgcttccttcctcctttccttccttccttctttccttccttccttccctccttccttccttccttttttccttccttgcttccttcctcctttccttccttccttctttccttccttccttccctccttccttcccttccttccctccttccttcctttccttccttccctccctccttccttccctccttccttcctttccttccttccttccctccttccttccttccctccttccttccttccctccgtccctccttccttccttccctccttccttccttccctccctccttccttccctccttccttccctccttccttccctccttccttccttccctccatccttccttccctacttccttcctttccttccttccttccctccttccttccttccctccgtccctccttccttccttccctccttccttccttccctccttccttcccttccttccctccttccttccttccctccgtccctccttccttccttccctccttccttccttccctccttccttcccttccttcccttccttccttcctttcttctttccttcctttccttccttccttctttcgttccttccttcttttcttccttcctttccttccttccttccttccttccatctgtcctttcttcctcccttcctcccttcttccctccctccctccctccttccttccttctttccttccttttttctttttaatcagatggagtcttggtctgtctccaccctggagtgcaatggcacaatctcagctcgctgcaacctccgcctcccggatttaagccattctcctgcctcaacctcccaagtagctgggactacaggcacatgcccagctaatttttgtatttttaatagagatggtgtttcaccttgttggccaggctggtctggaacgctggacctcaagtgatcctcccaccttggcctgccaaagtgctgggattacaggtgtgaaccatcatgccagctggcttgctttcttttctttctctttctctttctttcttttttctttttctttctttctctttttttctctccttctctccctttcttccctccctctctccttccttccttcctcccttccttccttctctctctctgtctctttcttctttttgaaatagggtcttgctctgttgtccagactggggtacagtggcatgaccatggttcattgtagcctcaaaccctggggttcaagtgatcctccctcctcagcctcccctcagccttccaagtagctgagaccacaggcatgtgccaccatgcccagctaattttttttcttttttttgtagagtcggggtctcactcgttatgttgcccgggctgctctgggacccctgggctcaaggagtacccctcattgggctcagcctccgaaagtgctaggattataggcgtgagccactgtacccagccaaatgtccccttttcattaggacactggtttttggaccagggtcccaccctactcggggatgatgtcatcttaactaactccttctgcaaagacattacttccaaataaggtcaccttctgaggtcctgggtgttaggacttcaccatatgaatttagggaggcgcagtccaactcataaccaccctgttgtcaatgtagggggttctttttctttttctttctttttttttttgtttttgagatggattctcgctctgtcgcccaggctggagggcagtggcgtgatctcagctcactgcaacctctgcccacccggttcaagcaattctcctgcctcagcctcctgagtagctgggattacaggcgcccaccaccacgcccggctaatttttgtatttttagtagagatggggtttcatcatgttggccaggctggtctcaaactcctgaccttgtgatccgcccacctcggcctcccaaagtgctggtattacgggcgtgaacccagccggggggttatttttcattgcatccattctcgtgtggatcttcattaggttggttccaatctggggcttttatgagtaaagtgactatgaacattcccatgcatatcttttgctatatagatgtacccttccttcttttttttttttttttttttttttttttgagacagggtccgatctgtcacccaggctggagtgcagtggctcaatcacagctcactgcagcctcaaccccccaggctcaagcaatcctcccaccccagcctccagcctcctgagtagctgggactacagacacttgccatgcgtggccaattttttctcttctcttctttctcttctcttctcttctttctcctctcttctattctttctcttttcttttctttttttagacatggggtctccctatgttgccccggctggtctcgaactcctgggctcaagtgatcctccagctttggcctcccaaagtgctggggttacaggcgtgagctactgcacccagctcaagcattgttaatagggatacatataacataggtgaagttcctgcacacagtgggaccacagagatgctgtcatcatttgtgattggctcagggaatcaggcaatgaattgcccattggagaagacaaggaatagaacagagggaagagagagattaaaggttaaaagcactgggcgctgtggcttacatctgtaatcccagcactttgggatgccaaggcgggcagatcacctgaggtcaggagttgaagaccagcctggctaatatggtgaaaccctgtctatactaaaaatacaacaattagccaggcgtggtggtgcgtacctgtagtcccagctactcaggagtctgaggcaggacaatcgcttgaacccaggaggtggaggctgcagtgagccaagattgtaccactgcactccagcctgggtgacagaatgagactctatctaaaaaaaaaaaaaaaaaaaaaaaaaaaaaaaggctggagggagttgtgtgttgcctggcaggtccacgggggacagagatccctcctacccacctgtttccccccagttctgtgccagtggggtcagcggggagatcaggagaaggagctgctggtgggttcagttgctttcgaggtgctggggacaggtggctgcagggagagtgagtgaactgtggggtggaccaatacaagggccaccctgtggggtagtttggggggctatctgggttcagggaacctccacagccccgtccctgcctcccagagcagcaggtacctgcctggggacagcaggcagccaggctgggagctggggggttggggaatctagctactctctcatccagtcccagctactgctgctggccaaggctgtgacctttctcccagatcctggagctgagtaacagttactggaaaaataagttggccatctgggggtggccacagccccatcctcttgggtccccagcctggctgctagaagtgagggtaccagggctgggctgtctgtcccatacaacagtaccatagccaccggtgtgaccagaccaggtacctcctccccgtcacactctatccccaccatgccacacttcccccactgcaggggcctgaaatgacagccccactcccatacccggacaccaaggaaggcgtgatgggtgggtggagaaagagtcccgggcatccctggcagccctgaatgtttcctctggccccagtctcagagacgcccatgcctgggaagagcaagtcagcaacttggcccagaaggagactttgacagcgaggagggctgcatttgaatttcagctctgtcactttttttgcaggtgactgagcaggtcactccttttctctgggcctcagtttccccctctggaaaaatgggaataatgaagcaccctcctggccggtttcgcaatgctcaaatgcaatatggttgtgctgagtgcaaagcgtggtcctgagagggcactcaatacacatgaacgattcagccctaagttctcgaaatatgttcaaggtacccgctgcgggtctagctctgtcctagacacaggagatccagcagcaaacaaaagtgacactgacacctgtccttctcgagggtttgggactccagggagagacacaaaccgtgaattaaaatgttaacgttcaagaaggatgaatgctataaagagaaatgaaactatcgttagatcttattattgttgtgactgttactgttgatacccaattgatcgtgattatagccctgattccagcttccacagttattggaggtatgcaattatttagcaccaactgtgtaccaggctccaaatacctatagccccacaaaatcatttcccagaagagaaaccaaggtctcaggtctgtccaagattgtgagctggttgtgcagggcaggcctgggagtggatctgccagatggcacgattcccggacctgcccccacctcccagggggagctggcatcctcccagctggacctggcccccccttggagcttccccaacctggggatacagaagggcccccacggggagggaggcagccagggcaggcagtggcacagagcaaggagggagcagggcgtctgccacccgcccccacggctgcctgggaaacgccacggcctaatcctggctcaagaggacacgttgtaccagagattatataaaccgacctctccctttgtttgtttaattctttcaggctttttccctcatccttctctctttaatcgctctgccaacagggctgggggtggggtgctccgggctaggcctcttccaggagggagggggctgcatacccagcaccccccactctggtcatacccctacctggtttcccagccacccaggcccgctcctcccccagtcacacacaccaagtcctgccggtggcaggggtgtggggctggacaggcttggccagtggagtgagtctgagaggccaaggccaagggcactgagtcaggctcggactctgctgggcccctaggatgtggcctctccacttggcactcagcttcctcttccaaaaaaatgggatccctgtggtcccaacccccaggttgttgagaacacgcccatgcaaggagtgagcatggcccatggtggatgccgggtgagagccgctgcctgctcccagcccacactacagacacccagggaacagtttcgccctcagactggccctggagcaccgtgactgtggtggccaattgggcctccgagatgtccacgatgcctggtgggtgctctgatgtggaacactgggcaccatcacccagagagggcaaccaggggtgtctggctttgtgctcacccaccgctgaccccgagcctggccctggccctcaccaagacccagtatttccatctgtgtcctggggaggccaacacgaacctccccaccatcagggcagtccacccacagaggggcctgggttcccatcctgaccccctcctttaccacctctgccaccctgtgctgcttggttgctctgtgcctcagtttctccatctgtaaagtggggatcatcatagcagtcagaccccccaagaggattaatcgtgttaatccttataatgcatttattcttaatttatattactttttttttgtagagatgggcttttcccatattgcccaagctggtctggaactcctgggctcacgtgatccacctgcctcggcctcccaaagtgctgtgattacaggcatgagccaccacatctagctatgcattttagaacgggccctcacgtatattaacatgaaagtatctgctaactaaaagaaaataacagcaacagaaataagtaaagaaatggccagttgcagtggctcacgcctgtaatcccagcactttgggaggccgaggcaggtggatcacctaaggtcaggagttcgagaccagcctgaccactatggtgaaaccccgtctctactaaaaatacaaaaattagctgggtgtggtggcgtgcacctgtagtcccagctactcgggaggctgagacaggagaattgcttgaacccgggaggcagaggttgcagtgagctgacatcgcaccactgcactccagcctgggcgacaaagtgagactcagtctcaaaaaaaaaaaaaaaattaaaattaaaaaaaaaagtaaagaaagaatccaggcccattgcacacatgggaaactgaagttgatgttcccaaagcaagtcagaggcagggctgggagctgagaaatcagctgggaacctctcaccctacacctccctggagcccagtggagggaggctgggggcaggggacagagaactgaggtcatggtgccaggtcccaaggggcccaggctcacgttcctgcctgatggctgcaagctcccaaacatcccactctgagcctctccttcccttctctgtacgacaagccccagggtggcacagggtgggcggggtgttggggtgcccggccactcccagccctttacataacctgcggcacagcaggaaatcaaagtgccaacaactgcctcctcagtaaccgacttcctgtcgttacccacccaccttgggcaccagctgcctgctccctacctccagtggcagaggggtcccatccctgaccccagggtttcctccccaaggaagggcccccgtaccctaggctgctccatcatgcgaccctgagccagtgtccagccagctctggcctcagttcctccatccagatgtgtccctgggctgccaggaccgtcaccctgctcctttcggccactggctgggagactgcatactggctgccccagacctgaggctggaggtcagagggcaaagggcaaaggccaaggaattccctttttttttttttttctgtgacagagtctcgctctgttgtccaggctggagtgcagtggcactatcttggctcactgcaacctcagctcccaggttcaagcaattctcctgcctcagcctccctagtagctgggattacaggcatgtgccaccatccctggctaatttttttttttttttttttgtatttttagtagagacggggtttcaccatgttggccaggctggtcttgaactcccgacctcaactgatttacctaccttggcctcccaaagtcttaggattacaggtgtgagccaccacacctggctggaattcctttttttaatttatttattttattaatttatttatttatttattttgagacagagtatcactctgttgcccaggctggagtgcagtggcgtgatctcggctcattgcaacctctgtcccccaggttcaagcgattctcctgccccagcctcccgagtaactgagattgcaagtgcacgccaccatgcccggctaacttttgtatttttagtagagacggggtttcaccatgttggccaggctggtctcgaactcctggcctcaggtgatccacccaccttggcctcccaaagtgctgggattacaggcatgagccaccgcaccggcccagaatttcctttttagagcgagagaagcaggagttgcctctcccattgagggagggagactctggttcttcagggcttttcaaagctgtgggtaggcggtagagggcgccccccacccagtggtgcaaagaggagaccccagccctgctctggaagggagtgagggattggggggaaggtctctggggcaaacagcacttagtgacagccacagtcatatgactgtccgcattttacagatagggaaactgaggcatgaagcaaggccgccatctgcccaaggtcccgtggtctgtaagtggtagagccaagatttgaacctctgaagacaggggtgttggtggaggtgtcagggaatgggacctccgtgggctctgtggggctggaaatcacaatatctctgcatagacatgggtgacgttcccttccgtgccgtgacccctgccaggcatgttagcgggttcctcttagacagatggagaaactgaggcccagaaaacagaagcagcttgggcaagttcattcatgggatatggtgagagaggctcggccagggaaataccctcagctgggaggactccaggacctgcaggcagcatcgccacccttcatatcgcccaccttgtgaggtcctagtaccccaggcctcagtttctccatctgtgaagggatagatgccagcagtctgtgactgcgacctcggaggctggctccctggggctccgcctggctgggcatgagggcctggagtgtgtgggcaggctctggagagccaggtgatgcctgtgcctacacccacggtgccagccctatgggacagaggggctggggttgactcttctgccacgctctgtgctctcctttccctactgcgcagggccaagcttggttccacgtcttcatccaaagctgcacagcacgtgagcgggaaaagcagggccagctcagccagctccaaagcccagctctttccacggtgtccggaaggtttcagagaactcaggacactagctccctggcctggagccccagggcccatgggcaaaagactgcattttcctgagcctcagtttccccgtctaccccacaagggccatcatccacctgctcattgctctgtgtcttttttttttttgagagggagtctcactctgtcgcccaggctggagtgaaatggcgtgatcttggctcactgcaagctccgcctcccgggttcatgccattctcctgcctcagcctcccaggtagctgggattataggcgcccgccaccacgcccggataatttttgtatttttagtacagacagggttttgccatgttggccaggctggtctcaaactcttcacctcaggtgatctgcccgcctcggcctcccaaagtgcttcacttttttttttttttttaagatggagtctcgctctgtcgcccaagctggagtgcggtggcgcgatctcggctcactgcaagctccacctcctgggttcaagcaattctctgcctcagcctcccgagtagctgggactacaggcgcccgccaccacgcccagctaattttttgtatttttagtagagacggggtttcaccgtcttagccaggatggtctcgatctcctgacctcgtgatccacccacctcggcctcccaaagtgctgggattataggcgtgagccaccgcgcccggccccaaagtgcttcactttgaagaacaagtaatgtgtccagtgagggagaaacactgggtagatgtcctgctccatggatcgccaaacacaggaagtgctaccagctgtctatccctcatccctgttgctgctgggcttctcctccccaaccgtgtggaagattgggagggagggttctagggctgagcccaaacagaccctgaaccacatcctgagcaagcctcacctcttgggagggctgcaggaggggttggggccttgactcagcagaaacacaagcagcggcctccacgcttgggatctgagtcccaccatgttgccctgcacggcctgggtgcgaccgtgaggggacctaggagcctaagtgttgcatgtggccatggatccctgggacagaccccttcctctctcagcctcagttttcccatctgtaaaatgggacaggccaggcgcggtggctcacgtctgtcatctcagcacttttggaggccgaggcgggtggatcacctgaggtcaggagttcgagaccagcctggccaaagtggcgaaatcccgtctctactaaaaatacaaaaatgagccaggcgtggtggtgcatgcctgtaatcccagctactcgggaggctgaggcaggagaatcggttgaacctgggaggcagagattgcagtgagccgagattgcaccactgtactccagcctgggcgacagagcgagactccatctcaaaaaaaaaaaagaataacactggctttgggagctgtgtgcgaagaggtgacaatgacaatcaatcccaggcgagccatggggggctgaaccaaggaggctccccctgcatccaacccagacgcattgatcacgcgcctaccatgccctcttgtcgaacccagggcagcctggagaggtgggtacaggggtcaccaggcagaggacagagagcccaggggcaggacagagacactgaagcagagggagcctgagttggcctcggactcaatgtgtgaccgtgagctggtgcctcagtttacatatctgtaaaatggggtgagaagtggctatgtcaggagtcataagatgggactcatctgtaaaagtacctggcacatggtacatgcacaataaacctgtcattgtcctcatctgccaacactgtaacgaggatatttatttatttattatttatttatttattttcgagacaagagtctcactctgttgcccaggctggagtgcagtggcgcaatcttggctcactgcaatctctgcctcccgggttcaagccattttcctgcctcagcctcccaagtagctggtactacaggcgcatgccaccgcgcccagctaatttttgtatttttagtagagacggggtttcaccatgttggccaggctggtttcgaactcctgacatcaggtgatccacctgcctcagcttcccaaagtgctaggattactggcatggccaccacacccggccatgaggataaatgaagcccgccctatactcaggagactgaggtgggaggatcacttgagcccatgaattccaggctgcagtgagctatgattgcacccgtatgatccagcccaggcgacagagcaagaccctgtctctacaaaaattaaaaaattagccaggcatggtggtgcattcctgcactcctagctacttgggaggctgagtcgggaggatctcttgaacccaggagttcaaggctgcagtgagccgtgactgcaccagtgcactccagcctgggcaacagagtgaaaccctgtctctaaaaaaggccaggcgcggtggctcacgcctgtaatcccagcagtttgggaggcagaggcgaggggatcacctgaggtcaggagttcaagacagcctggccaacatggcgaaacctcatctctactaaaaagacaaaaattagccaggtgtgctggcggccgcctgtaatcccagctactcgggaggctgaggtaggaggattgtttgaacccaggaggcagaggttgcagcgagccgagatcacgccactgcactccagcctgggcgacagagtgaggctctgtctcaaataaataaatattaaaattaaaacatgttaaaaatgtaataaaaagccagccctctgaaggactggcccatcgtagcaagtcaataaatgtttgttgagtaaataacaaaaataatgacgcagctccttccttgggcatgatgtcttcccgtttccaaaactgctagatttctgcagctggcttctcagcactgtggacatccgggccagatcggcatgtgtgtgttggggaatgtgctgtgcatggcgggaggtttcgcaacatccctgcctccacctactgcatgctagcagcaactccccccacccacccacccacccctgtcccagtcataacaaccaaaaatgtccccagacattgccaagtgtcccctggggggcagaattaccccgttgagaaccactgcccggcatcgcggttactgttcaaagttcccttttagcagaagagaataaaggctcagagaggggcaggtctagcgcagggtcacacagcacagtggggtggagccaccttctgtgctgggcatgactccgggcacagccgagccgaggtgggggccaacaacccctaccatgccagggttccaggaactgccagcaggggcccaggccatgccactgttgcaaaatctgagggcggcataccggcaagcctgagcagttgccacggcctcagccccacgggcaccgccaggaaagaaaaatgcaacttactcctgggcaccgggacaaccggtggaacctcaggcgtgggacggctgccggaaagcagggcccaatcagagacagctgccttgctgtgtggcctatcagaagatggctgcatatgtcctggccaatgagaatgccccagtgaggaaggccacgcccccccaagtgaagcccattggccccatgaaagggcttgaggtgggtccctttggtcctaaaatttcttcttcactctgttggttgcagacgcaggtcagctgaggcttcctgatgtgtgggcactgagggtcgatctgggagagcaaccttctcagaggtgtaacccccagactgttaccacttaaccagagccaggattctccttaacatttcaatgtcacttattaaacctttatacatttatttattaaatagagacaggggtctcgctatgttgcccaggctggcctcgaactcctggcctcaggtggaattcccaccttggcctcaaattcccaaagtgctggaattatgggtgcgagccaccacgaccggcctcattaaacatttattgagcacctgctatgtgctggtcactgaggatgtgaagatgaacaaggtggctgtagagaaacagccacattggaggaagggcattccaagcagagggaacagcccatgcaaacagcctggggcaggacggcacctgatgtggaggaacagcgaggaggcccgtgtggctgcagcggagggaggagagggagagagggaggaggcgagggcagggagggacagggtgggtcaggcagggctttgtagccctcggggaggactctgtcgcctggagggcagtgaggagccatggagggctttaggcagtggagagatgtgatgtgggactagagccaggtcctttccctctctgagcctcagtctcctcatccgtcaaatgggggaatgagaatgcctacctgggggccggatgcaggggggagggaaggaccctgcacagtggccggcacatggcaggtacacagctcccaccaaggtccagccctgtcatagcccgcctggacctgtgccgtcccctccgcctggatgctcccactcccaccctcgcccctccacggcctgtcctccctgaagcagccagagggtgcctgtgagcacccaagtcagggcccatccctcctctgcccgcagccttccatggctcccacctccctcaggatcaaagcccaagtcctccttgcagcctacgaggccctgcacaacctgttctgtcccctccctgccctcccctccccgcttactccttgtcgctcactctgctccagccacacaggcctccttgctgttcctccaacacgccaggtgccatcctgccccagggcctttgcacagacctgaaacgctcttcccccccccccgcccccccctcccgccgcccggctccccatggctcctcccttgcctccttcaattctcagcttcttaaaattgcacccttggccaggcgtagtagctcacgcctgtaatctcaacagtttgggaggccaagggggacggatcacctgaggtcaggagttcgaggccagcctggccaacatggcgaaaccccatgtctactaaaaatacaaaaaattagctgggcatggtggtgggcgcctaaaatccagctactgggaagctgaggcagaattgcttgaacccaggaggcggaggttgcagtgaactgacattgtaccattgcactccagcctgggtgacagtacgagactctgtctcaaaaaaaagaacagggcctggcacacagcaggtgctcaataaatgcgggtgcatgaattgctgaaaggcggctgccattatccttacccctccatgttccagatcagtccctgtccccctttttgccctccttctcccactccagccaccctccccagccctgggggaaccccagacgtcctttgggtgggagagggaggagcaggtaggaccagccacctccagcagccttcagcccctcgtcacaccgacggccaagcaggagtcctggtgcttttcttcttgaatcagaggagggggtataagcccggcagtggccacgcttgtgtagggggaacttcatgccacacggttgcctgagctcagttctggccaggggctgtcctgtgggatggcttccctggaggtggtggggatggttctacgtgggtgggtgcagaaatgccgtggggtcccgaccccacactcaacctgtaagcccagctcagaccatcttggtgggggtggtaggcaaggccctggcgagccccctctttccctatttctggcccagggtccccgcctttagctctggactccaccagcaaaaccccaacgccacgaggttttcaacgatgaacagatggtcacaggcggtgggggtgggggctgagctgagtctgaggggacccagggtctctggagcagtcctgctgccctcccagtggggaaactgagacagggagccccctccgtgcccctgtgcctggggctgggaaaccggtgccatcctcggaagatccccagagcggccacgtcatagttggcgagggcagctccggggagggcgaggaccgggcccactgccatgtcaaattcctcccgggagcggtgggggaaggagaggcagtgcttttttttgtctcccctgcatcctcacccccaccaactccgcgacagaatcaaaaagaggagagagagagctgttggcaggaagaaggaattggagccaagccgaggctgggctcaccctgaaaaatcacactctgggcgggaagagaggacagaggctcttccaccccctttccagcattttgcaaaggcggaaagggggtggcccactcaaagggcatcagacgtggccttcacggcccgcagctggcagctgccacctctcccacgagtggcttgacaggctttctacctccagacctcagcttgggccgtcctctcctcctggaatgccttcctcatccacctcagtctcctcccaggcaccacctgggatctggacttcaagtcccatggacctacaaggccaagaagggtcgcgttgcatcctaaggccaaaataaaccccaaaagcagtaatatgtaatcgatctttatttaaatattggtacttcattcattctggatcttctgcaatcacttttattcttagaaagtttgtgttaaaacatgagttatcagttgggtacggtggccccacccacccagcacccagtgtcaacccagcactttgggaggccaaggcaggaggatcacttgaggccaggagttcaagactagcctgggaaacatagcaagaccccatctctacaaaaatttaaaaattaggcagggcgcagtgactcatgactgtaatcccaccattttgggaggccgaggcaggcggatcacttgagttcaggagttcgagaccagcctggccaacatggcgaaaccccgtctctactaaaaatacaaaaattaaccgggtgtggtggcgggcgcctgtaatcccagctactcagggggcaggagaatagcttgaacccagaggcggaggttgcagtgagccaagatcgcaccactgcattccagcctgggagacagagctagactccatctcaaaaaaacaacaaaacaaaaaaagagagagagaaaataaaataaaataactccagggaggggcaagggctatgcgtatctgaactctgtcccagcccatggagctgcgcagggacggaggggccccaggcacagtggggccggctgcactaacctggtcatcagtctttgctccgggagcttcagcactgagttttcagggaaggcatggctgcctgggttccttcctagtgccggagcccgctctcaggggcatgaccccagcagatccagccacgccagcggtcccattgtgtgaccttggataacccctttccttcatctgacgcctcctctatcaaacgaggtaataagggctcccctgcctggcctggggctgtctgtgcatgaaatgggataattgccggaacccggcctggctaccggagctgttattaaggctgcagagctacctgtgggcctcaatttcctcatctataaaatgggcttaatcatacctgctgctgttaacctctcagggctctggaggatcaaggggcactgaggatgccttgcagaggaaacgtctgaaggccgagcaaattctgcaaaagtggcctcagtggcttttcttgtgaggttgcctgccccccaccctcaatttgtataacgtcccctgcagaagtgtggagaaagaggaaaaaatataacaaacaaacaggcaagaaacagccaacacagccacatccattgttgcttttttttttttttttttgagacagagtcttgctgtgttgcccaggctggagtgtagtggtgagatctcggctcactgcaagctccaactcccgggttcaagcgattcttttgcctcagcctcccgagtagctgggattacaagtgcgtgccaccacgcccggctaattttcgtgtgtttttttttagtagagagagggtttcaccatgttggccaggctggtctcgaattcctgacctcaggtggtccaactgcctcggcttcccaaagtgctgggattacaggcgtgagccaccatgcccagcccattgttgcaattttaacctcttttctcctgtccccgaagcttacccctcagtttctttttttgtttctttttttttttttttttttgagatggacttttgctctgtcgcccaggctggagtgcaatggcatgatctcggctcactgcaacctccacctcctgggtttaagcgattctcctgcctcagcctcccgagtagctgggattacaggtgcacgccaccacacccagctaatttttgtatttttagtagagacggggtttcaccatattggccaggatggtctcgatctcttcaccttgtgatctgcccaccttggcctcccaaactgctgggattacagacatgagccactgtgcctggccatccctcactttcttttcctgctcttttttgctgctaagatatagaaggtagagccattggggcttaaggagatgggctttatgagtcaacttgcccaaattcaaatcccagacttaacactggctgtgtggcattgaggaagtgcctcaagttctctgtgcctcagcttcctcatctgtagactgggaatgatactgttaggttggtgccaaagtaattgcagtttttggtcaggcacggtggctcacgcctgtaatcccagcactttgagaggccgaggtggtgaatcacaaggtcaggagttcaagaccagccagaccaacatggtgaaatcccgtctctactaaaaatacaaaaatgagcccagcgtggtggcacgtgcctataatcccagctacttgggaggctgaggcaggagaatcgcttgagccctggaggcggaggttgtagggagccaagctcatgccactgcactccaggctgggcaacagagtgagactccatctcaaaaaaataaataaataattattatttggtagagatggggttttcccatgttggccaggctggtctcaaactcctggcctcaagtcatctgaacgccttggcctagttttggtatttttattagagacgaggtttcaccatgttggccaggctggtcgcgaactcctgacctcaagtgatctgcccgccttggcctcttaaaatttttacttttttttagtgatgaggtctgcctctgttgcccaggctggagtgcagtggtgtcatcagctcactggaggctcagcctccctgggctcaagtgatcctccctcctcagccttctgagtagctgggactaggggtgcgctccacacacacagctaattttgaaattttttgtaaagatgggatctctctaggttgcccaggctgatctcaaactcctgggctctagcgatcctcctgcttcagcctcccaaagtgctaaaattacaactatgagccaccctgctcggttttgtttttttacattgtttagtggtagaaagaagtcaaaagaatactttgtgacacgtgaaaagtacatgtgattcacatttcagtgtgtgtaaagtttgattggcacacagccacgtttattcatgaccatgccgtctatggcagcttttgtgcactagggcacagccaagcaggtgcaatggggatgatatgtcctgcaaagatgaaaatatttactctctggctctttacagaaaaagtttgcccacccctgagttaatgtatcatgagcactttgaacaatgctgggcacaaaatgtgcttgggattgttattcaaaatgtgtttcaggtcgggcgtggtggttcacgcctgtaatcccagcactttgggagactgaagagggcagatcacctgaggtcaggagttcaagaccagcctggctgacacggtgaaacccattttaatctctactaaaaatacaaaaattagccaggtgtggtggtgcgtgcctgtaatcccagctactcaggaggctgaggcaggagaatcacttgaacccatgaggcagaggttgcagtgagccgagatcgtgccgctgcactccagcctgggcgacagagcgaaactccatctcaaaaaaaaaaaaaaaatgtgtttcaggctgggcgaggtggctcatgactgtaaacccaacactttgggaagccaagatgagaggatcgtttgagccctggagttcaagaccaccttgggccacagagcagataccacctccacaaaaaaattttaaaaaattagccagttgtggtggtgcactcctgtgtagccccagctgctcaggaggctgaggtaggagatcccttgagcccaggaggacaaggctgcagtgaactattattgcaccactgcactccagcctgggtgacagagcaagaccctgtgtcaaaaaagaaatgtacaaaggttaaaaaaatatatatggttggccgggcgcggtggctcacgcctataatcccaacactttgggaggccgaggcaggcggataatgagatcaggagatcgagaccatcctggctaacacggtgaaaccccatttctactaaaaatacaaaaacaaaattagccaggcgtggtggcgggcgcctgtagtctcagctacttgggaggctgagtcaggagaatggtgtgaacccaggaggcggagcttgcagtgagccgagatcgtgccactgcactccagcctgggctacagagctagactctgtctccaaaaaaaaaaaaatatatatggttcacacaaaaattatatcctatgttgttctctataaacatcccatcatattatgtctcccagaccactgacaatttttggaagcctcactctgccatctcgtgaaatgtcctccacagtcccctactgttggacacttaagctgttcccagttgctaagacggagctgcagggacagcctcgcgttttaagctagatttgcttttatgtaacaattacttctacatcattcactatgtgttaagtcctatctctgggcactttgcaaatatcaacttatttcatgctcactccaactcccataaactccccattttgcagatgggaaaacggaggttctgtaggttgaagtgacttgcccagggtcacactaccaggatatgaactcaggctggacaggtcctgtcagtgccctgagacgcccttttccttccctacggtagagacccaggagctaaatcactctgtcaaaggggaacaaaaattcttgccagacatggtggctcacacctgtcatcccagcactttgggaggccaagacgggtgagttatgtgagcccaggagtttgagaccagactgggcaacatggtgaaaccccatctctactaaaaatacaaatattagctgggcatggtggtacatgcctgtagtcccagctgctcaggaggctgaggtgggaggactgcttgagcccaggagttggaggctgcggtgagccatgatgaggccactgcactgtggcctgggcaacacagtgagaccctgtagaaaaaggaaagaaaggaaagaaaagaaagggaaggaaaagaaagaaagcaaatgaccatgcaatgaattttacagaaatgcacttggtaggggacccatcccattcctcagcctttgaccaagaaacatatgtttttattttattttaattaattagttaattaattttttgagacagagttttgcctcgtcgcccaggctagagcgcaatggcatgatctcggctcactgaaacctctgcctcccaggttcaagcgattctcctgtctcagccccctgagtagctgggattacaggcatgtgccaccacccccggctaatttttgccttgttagtagacacagggtttcatcatgtctgccaggctggtctcgaactcctgacctcaggtgatctgcctgcctcagcctcccaaagtgctgggattacaggcgtgagccaccacacccagcctattttatttatttttgagacagggtctcactctgttgcccagcctagagtgcaacggcacgatcatagctcgctgcaacctctgccttcagggctcaagccatcctcccacttcagcctctggagtagctgggaccacaggtgtgcaccaccatgcccagctaaatgtttgtattttgtgtatagacgtggtcttgtgtcttgtcatgttaccccagctggtcttgaactcctggcctcaagcaatcctcatgccttggcctcccaaagtgctgggatgacaggcatgagctaccacgcctagccagaagcaaatattcatataaaagttcctccatgaggccggatgtggtggctcacacctgtgatcccagcactttgggaggctgaggcgggcagatcacctgaggtcaggagtttgaaaccagcttgaccaacatggcgaaatcccatctcgactaaaaatacaaaaattagccgggtgtgatggcgggtgcctgtaatcccagctactcaggacgctgaggcaggagaatcgcttgaacctgggaggcagaggttgcagtgagcctagatcgggccattgcactccagcctgggcgacagagtgagactctgtcccaaaaaaatacataaaagctcctccaggaaggttcccagcaactttgtgagagtccaggacagcataacaccccctctgccatatctaatcgtaggtcaatgggcaagcaaagcatcatacatccatacagttcaatccccatccccagtaaaagaatgcacagtcatacacagaatcacatgaacaaatctcagataatgatgccgagtgaaagacaccggacactaagaatgctgctggccccagctatgctcatctgcttccttattgcctgtggctgcttttgagctgcagtggcagagttgacgagtgagttgctttggatagttagtaactctccaggcctcagtttctgcatctgcaaaatgggggtgactgctgggcatggtagctcatgcctgtgtttccagtgctttgggaagctgaggcaggagggtcgctggagcccaggagttcttttgaggccatcctgggcaacacagggagaccctatgtctacaattttttcgagacagagtcttgctctgttgcccaggctggagtgtagtggggtgatctcagctctctgtaacctccgcctcctgggttcaagcaattctcctgccttagcctcccaagtagctgtgattacaggcgcctgccaccaccaccacgcctggctaatttttgtatttttagtagagatggggtttcaccatgttggccaggctggtcttgaactcctgacctcaggtgatccacctgcctcagcctcccaaagtactgagattacaggtgtgagccaccatgcctggcctacaaatcttttttttttttttttttttttttttttagccaggagtggtgacacacctgtggtcccaatggctcaggagtctgaagtgggaggatcactttagcctgggaggtcgaggctgcagtgagccatgatcatgccattgcacaccagcctgggagacagaataagaccctatctcaaaaagtaataataataattattatatatgtacatataatatataatacatatatgagatttttgaaaattatgttgttttagagatggagtctcactgagttgcctaggctggagtgcagtagcattcatagccatgatcacagcacactacagcctggaactcccgggctcaggtgatcctcctgcctcagcctcctgaatagctgggactacaggcctcgccgctgaactaggtcttttatttatttatttatttatttgagacagagtctcactctgtcgcccagggcagagtgcagtggcgtgatctcggctcactgcaatctccgcctcccgggtttaagaggttctcctgcctcagctttccaagtagctgggattacttcgaactcctgacctcaagtgatctgcccgcctcagcctcccaaggtgctagtattataggcatgagccactgtgcccggccgtttttgccttttgcatagcacagtcataaatatcctgggtcatgtttcctgtggatatttatctaggagagcaaaggctatgttacttggtgcatgcatgttcagcgttgtggctgatgtcagtctgtcttccagagagactgcagtgtggaagagctttgtgtatccatggcttctgacacttgctattattggacattttaaactagggggcagtgaaaggggagtaaaaaggggcctgtgactttatcatacatgtcctggattcctaacaacgttggacatctcttcatctatttgtcggatgctcgtgtttcctgttttgtaatatgccttctcaggctttgcacttattattatttttttttgagatggagtctcgctctgtcacccaggctagagtgcagtggcgcgatctcagctcactgcaagctccacctcctgggttcatgccattttcctgcctcagcctcccgagtagctgggactacaggctcctgccaccacgcctggctaattttttgtattttttagtagagatggggtttcaccacgttagccaggatggtcttgaccttctgacctcatgatccgcctgcctcggcctcccaaagtgctgggattacaggcctgagccactgcacctggcctgcacatttttcttttgagtggttgtcattttcttattggaacttcattctattttttttttaagaaatgggggggcggtctcactatattgcccaggctggtttcgaactgctggcctcaaatgatcctcttgcctcacccttctgagtaaggaacttgattcttcttaaaagactgtatgagattccattggaaggttttcctattctttacggcatgcattctcaacaaggacaaaaattggtttgtggcagggggaggggtgaaaaaaatcttactcttttaatgtaaaaaacacagcagaacactgatatacatatagtatataagcaaatatacaggacatctatgttactaaattttcatgtggggtgattaggaaaaaaatgtctaaaaagatctgtggggtgataatgacaaacaaggtttttttgttgtttgttttttgttttttgtttttttctgagacagagtctcgctctgtcgcccaggctggagtgcagtggcgcgatcttggctcactgcaagctccgcctcccgggttcacgccattctcctgcctcagcctcccaagcagctgggactacaggcacccaccaccacgcctggctaaattttttgtatttttagtagagacggggtttcaccgtgttagccgggatggtctcaatctcctggcctcatgatctgcctgcctcggcctcccaaagtgctgggattacaggcatgagccactgctcctggccccttatttcttcattttgagacacagtctcactctgttgcccaggctagagtgcagtggtgtgatctcagctcactgcaacctctgcctcctggattcaagcgattctcctgcctcagcctcccgagtagctgggactgcaggcacccaccactacgcccgtctaatttttgcattttttgtagcgatggggtttagccatgttggccagcctggtcttgaactcctgacctcaagtgatccaccagcctcggcctcccaaagtgctgggattacaggcgtgagccaccacaccgggcctctgttggttttttgagacaggatctcactctggagtgatctgcccaggctggagtacagtgtcgtgatcacagctcactgcagcttcaatctcaaggctcaagcaatccacccacctcagtctcccacctaactgggactacaggtgtgtgccaccatgcccagctaatttaaaaaatttttttgtagaggtgagttctcactctgttgcccaggctggtctcaaactcctggcctcaagcaaccctcccacctctgccttccaaagcactgggattacaggtgagccactgagcctggccccatatatatatgttttctcaagtttagaataagctcccaaaatttagaccataaaatctgagcctgtcttaggcctgtgccacacaagccaaactgcttttacaattcatacacccattcaagcaatgatgaaaatgcctgtttcactacatcctcaccagtaccgggttttatccatttacaaatctgcagtgacttcgaggagtgccaaaccatggcagattcttattgtttttccacctttctttggtctctgtaaggctgaaccttttaaatatgtttgctcatcaggctgtccctggggaatgttctagagcagaacatcaagttgacccctatggaaaaaggggtcccttcatgtagaggggcagaaatttagttgtgttgtagcctacagttatgcagaaagcagaatttgcaagcagtgcacttggatatgtagcctaggggaatttccagcaaagtgttgaaagcgcagcctggtttcttctctctgcttgttataaaatgtgagaggaaatagacagattgagggaagaagtgtgaagtaaaaaggaaccaggacttgatgatctgggaaattctaagcccattcagatcacaaaagatgctaaaattagatgctcccgaccatcaccacttctcagctccgtgacctcaggcaagtgtctaaacctctctgagattcagtttcctcatctgtgaaatgggctcgatggtaatagcagccacttcagagggctgcggtgaggggtgagtagcttcatgtcaagcacttcacgcaatgccaggcagttgcagggttcgtagggaaagtaatgggtgagaggcgctacaccagtgctccactgtctctacgcccctcattacttcctggctgctatcaacccatccctcccctcccctcctcacccccaggtacctaattcccagaggcaggggagcgggtgaggattcaagctgcggattagcagaggccgattagagacgggtgggaggggggagggagggggggggtctctaacccactaacccttcccttgccggtcctgcctcaggtttgcgggaggggtgggggcctgcaaaacctcggtgcctgccacacccttggagaaagcattagtgtccctgctggttgaccccaggttgacccctctctgggcctcattggttccttctgaactatggggcgaagactgcagaaatgaaatgggaaagcctcagcgtctgaagatgagggcacagggtaaatgcctcagggctggctgagacatccttcgcgtagacaacacttactgagcacctaccatgtgggcagagctgctggcatcaacgtcgcctagaactgctcagctcccagagtgccagactcaacttccagaacccccagactcagccatcgctccgaaggggcgctccgggaactgattctcctcccggggtgccacctgctctcaccctcaccctggcgtcctccctgggggagcagggaaccactcctccaaaggggtccctgaaatcctggatcctcagtgtgtgtggaggggggtggaactggggaaagacagaaggaccatagcagaacccctttcacccgtcaggtcggagcaacactccccccacaccccctgcaacctcccccagctgcgccagacgcagagccggtgggggcgagggggcggcgcctactctgcggctgtcagaggagggggactgcgggagagcgcttgggggggcgctgcggcagccggtcccaacccgcagcggctcgcgcggcaggggcgggggcgctgacccacctcggcccggcccctcctccgctgcggaggcctcgccattaatcctgaccgggggagggggcgcccgctgccccccacttcctacgggggccgctgcgagcgctcccctgccgccccctgcctggagcccctgcgggacccccaggggacccccgccccaggtctgtcgccctcggtgtcggagtctctgtctgtgtccccgtctgtcccgtctccctgctgtgcgtgtgtgtagccgcgtgtcccccggacacctgcagtcaccggccagggctgctcggggaggggtcccgggggtcggcgcgtgagtccctctgaggtctgggtgtctttctgggactgtgcgtctgtgagatctcggggtgccagccccacaggctgcgagtgtgcgtctgtgttgacctcctgcagaaggtgtgtgtcccagatgccccaccggcttcgagcatgggtccccgtgtgcccggcggacacccacgggccgtgtgtccgtcacacgctgtaggcgccgcgcgtggggatctctgcgcgtgtccgtgtgcggtgtgtgtgtgtccgtggctgagtcgaggaggcccggcccgccggtgtccccgagtcgcctgcgcgtgagtgtgtgtgtgcgcgtgtgtgtgcgcgcgcgccgcggcgaaggtggatccgctcgctccgcagcgagcccagccggggccccgcgacctgcagccgccgccgccaccgcctccgccgctccccgggcctccccttgcgcgggccgggccggggatggagccgcagccggagccgccgcagccggggccgcggcgcggagcagcctgaggcgcgggcggtgcgcgggaccggggggagggcgggccgaggggagggtcctgcgggccgggggggcgggcgcggcgcgccccctccctggcgcgctcgctccctcccccgcgcgccctccctcgccgcctcctcccgccgcctgcggcccccccctcgccggggaccgagcgcgctcgctccggcgccggcctcgcctcctcgcagcagcgccatggtacgtcgccgcacccactttcgttttcgcccggggactttttggggtggtgcgtgggctccgggcgaaagttgcaagatctggggggacagggggcgggggccgcccggaggaggggctcgaggcggggacccccactcgccagtcgccacgggacccctacccacgatccccccccgcaccccggctgggggcggagctggcgcgcggggcgccgcgggagaccccaagtggggggcccctcgcgggcgccgcgagttggcgaggagggcggggctccccggagaaggcccccgcaaccccaggccgggcccccgccccctccccgggccagaccccaggcgggagggcgcggccctgggcgcacgacccccgagcgcgcagtccgtgggggagcccgggccagggagggggcgcacggcgggacggcgcgtggggcgggggtcgcggcggcccccgcggggtgccccggcccgggcgagcgcggcgcgccagctagcggaaaatggccgctgcggagaggggcggagagcgcgccgcggccgccgccgggcgccttgaacttggagccgggcgggcggccgcgctcggcgccgcgcaggagcagccgccccgcctgccctcgcaccgcccccgccccgcccctcggcagacccccggccccgctgccgcgcgcgcggggtccccagctgggagggacccccgggtctcggcccggcgcgccccaggccctggagcggcggtggctgcacttggggttccggtgtccggtcgactggcgtcggtgtcgtgcgcacctcgaggggtgcgtgggagcccctgcgctccgtaacgggccggcattggcatctgggggagcgtctggggtgtgcgcggcggggtggtagtgtacctgccttggggccgcgggtcccggcgcgtcggctccgccgctttctgtgtccgcgtgtgtctgcacatccacgtgctggcgcgtgttgtgttgtgagcgccgcccgcattgtgcggctgcgggacacttgtgtctttggataactgggcgactgtgcgcgcgtccctgcgggacggtgttgtgaaactatggctgggctgcgtgtccgcggagccgcgtgtccctgggtgaccgtggggtgtccccgtgtgggtgtgtggcggttggggggggtcgccagggagtggagaactgtcgagtggccgcgttccaggggacagttgggtgccgcttgctgtgtgcgagtgactggcgctgagcctccccctagggaagggtctgccttccactcccggcctcgcctcccccagttccttttttcctgtaactggggactgcctgggcggcggaggaagagcgctccctccaccttttcaaaactctgtccctttatctttcccctacgtcccctccacttcccccagccttcggggtcccccatccgcttggcccgagggggtcctggctggaggttcgggcgcgaggtggcgccgggacgcgatcactcggcacgcagacgtcgctcgccaggggttgcgcttgcgcggggacctgccccgagaggggcggggcggcaggggttccccctccctgagaggccgtggaagtcccgaggggtgggtggttacagcagcacaggggttaggacgggcccgggaggtggctaaggagacccctattatcctatgctggggagagcgtaggggcaccgggactggtcccgcagtcccgcctccagcacttgcccccaatggaccagaggccgtgggcacagagagctgttttgtcacctccagggaaatccccgccgctctccacccccaccccacccccagtgcgtttgatataattttctaaatataaaaagcccaaggccaggctggtctctctcgctttcttcttgacatcccatcatggggggctgtttgggatgtcaagaaggagagaaaaccctcccacaatgacacagaggcctcccccaacaacactcaaggtcattctcgggttgtcaccatccctcacacccactcccagcctcagactcacagctatctccctccgcactcccggagggacggttggatgccctggccttcagcacacggcatggccctctgtccccattttgggttctgtgcacagtgggacacacgtgcatgcagtcatagttacacacacacacacacgacactccctcacggtgcctgtgtctgcatgactctgcacacacaaccacacagagactcacatagacacacacaggcctgtctagagacagacgtcacacacacaggcgtgcacagacacacatgggcagacacactcacggacacaaacaccgcacttgcggggggatagacaaccacatctcaccctcctgcccttccctgtccccaccgcgtttctgcagggccgagagcccagctccaggcagagctggtgcaggaggagcagggaggtggcgtgctgtgtgtcattgtgatggtgcgtatgtgactctgtgtgtgcctgtatgggaataccggggggttccacttgtgggtgtgtgtgtgcttgtaagagtgtgtgcttttgtgtggagtgtgtctgtgattgtggacaagtgcccatgtgtttgtggttgtgtctgcacttgtgtgggggcagctatatccatgcgttgtgcttgtcaagaagcgtcctgtggggagttgggagggtgtgtttgtggctgtgtgtgtgccatgtgggtctgtgtgtgtgtgtgtgtgtctctgctcgcccctctttgaggaggtatctgaggtcaggtgtggggggaaggctgtgatgatatatgggtctgtttttatgtgagtctgtgcgtgtatttgtgtctttgtgtatgtagctgtgtgtcgtgtggagtctgtgtctgcagctgcttgagtctgcacgatgtgtgtctgtgtgtctctgtaggtcgtagtgtgtggtgtgtgtgtctatctgtaccagcctcaacggcctatctgacctttaactcacttgactttaacatcccttcttacagcctcagtttctcatctgtaaaatgggaccacatgggacccttgcaaggttcctggggagctgacattgtgagccccttgctgagcaggtgcggggctaggggaggctgactgcacactgcactgctgtgtaatcatttgcctgcaagattatgtcctttattctctgggtgtggtggctgtggggttaccatggggggctgggggttcctgtctaccctgcctgagctgctctgtgaattgcattcaactttttaagttttcctttaattactgaagccattagtgatcatatgaagaggatacaactgtatccagaggaaaaaaaatccaatctttctgatcacccccattcctgggtggaaccccgctccagaatgttaccatctatagttggagcatttgcaggactgagaaatacacacttatagaggatacatgtgcatatgtgtatatttccataaaggatgtacttgtggaaatactcgtgtatttccataaaggagacatatgtatatgtatgtgtatgtgtgtgtatatatatatatatatatatatatatattttttttttttttttttttgagatggagtttcgctctgttgcccaggctggagtgcaatggcatgatcctggctcactgcaacctccacctcccgagttcaagcgaacctccagcctcagcctcccgagtagctgacattacaggcaccctcgcccatgcccggctaatttttgtaattttagtagagacggggtttcgccatgttggccaggctgattttaaactcctgacctcaagtgatctgcctgcctcggcctcccaaagtgttgggattacaggcgtgagccactacaaccggccaaaggagatatgtgtgtgtgtgggtgtgtgtgcatgtgtgtgtatgtaaaggatactatgtatatttgtataaatacatgtgtactctttaaaaccctaaatgagatcttgaatttccttgctgggtctacagcagtggggtctcagccagggttgattctgttcccatgggacacttagccatgtctaaggacatttgtggttgtcacgactggggggtgcccctggcatggagtgggtggaggccatggactctgctcagcaccctgcagggcccaggacggccccaacccagagagcgatccagccccagtgtccacagtgccaagggggagagctctccagctttctgtccccccacttgtctcttggggacataaccagttgggagccactggttttactcagctgcatagtgtcccagcctgtgttgggattactaaaccggtcccccacagatggacagcatggctgcctccaaattgtgggcattagttttataggtggcagtcaactcttttgtgctcctgtatctgggacagttacagagatgccgaagagtgaaataactgtagagagagtgctttgaaaaaaaaaaaaaatgagccagattgtgctcgaaagtgccaggagctaaatcatgcacccatcttccgggccctccacatgcaggtcccaatctaccaattgcctttttaaagaaactatgacgtacagttccctgttgtaaccacgggcaggtatttgctgacttgcctacaacctggagggttatgagctggcgtcgccccatttcacagagggagagccgaggtgcagagagacgaagctgctgactggaggagacatagacccaagcagcgagcccacgcggcaatttagggaaccaactgtgtgtgctgcgggggtcccttgccacccaaactgggatataggctgctgttcgtacacttgcagaagtttctccctgcagctaccgccaccaataatattcacacagccttcccacatgctatgtaaagactccaaccttccccacctcccaagatgcatcctgttactatagccattttacagatgaggaaaccgaggttccaagaggggcagtctctgctctctaaacttcaccttccaaaggattctaagctgctgaatgaaggctgcaggcagggtggtctgtacaggggagggagggtggaaggcacggggtctggaagtctaggaggagtgtctgaagtcaactgcaacttttaaatatctgtgaattttagatttcaccctgtatgtgtccctagcgtgttttaataaaataaattgcttcacgttatattggtatgtggatttccagatacacttctcaccatttaattcaaatgctccccacagctgcacagtgggtttaaaatacacagacacacacatttatggaccgttcgtgatgtactaagcactgtttgaataatgtcaccgtcatgcagaggggagcctgtggggggcctagggaacctacgctgcaggaattctgctccctcctagtttacctgtcagaccctgggcaagtggcttccgttctctgggcctcagtttcctctcctgtaatgcctgaggataatgggtgctggtatcttctgcgcccctgggcctggggcacctgccccagcttggtgagagggtatcatttgtccttgggaagctcagagagatgaggtgaaatggccaagctttctaagaatgtgtctttagtgaacatttgacccaaggtcaaggctctgctaaggtcattgtccttatccccagcaatcccacaggatgggcatctttaagccactttataggggagaacccttgggatgggaatgagagacacagcagcctctgagctagcctgggaggatccagggagtgaaccgggggagggttggggccctgtcatcagatgccctgggggctcagacggaggcaggccaggtctctgccctgttacgtctagaaggagaacagaatgtgggctccaggtccagatggcctggctccaagccacacttgccatacctcagtcttgagatctgtgaaaagggcacacccctgaggcaggtggaaattattggatacccagggggaggctgcaagggtttatctggccagctggagatcccgcctggacaccgtcctcctggggtgctggagagacacacaggcgaggccacccctcccctgccccttgggtgctgggtgaagagagcaaattctggagcctcccgtgttagcctgggcccttctggccaaggaagggacagctgcacacaagcccctctagctggggacccgcagcccctgcctggctctggggggagaagggagccagggtgctgtgggaccagctcaccgtgcacccagggtcgtacatctttaaggggaaagaggcgcgctggccggcctctgcgcacgtcacttcttcattccttccctcccccctggctctttcctccaacttcccggccagctcgggggtgatgggggggtggggagggggggccttaaaaatccacccctggcccctcaatgtccagaaacaaccctgtcccccctctccgcttgatccgaattggggtcgccctgcagtcctggggtcctggtctagtgccctggggcattgcgtaaatacgggaggagcgggggggtcctgagacgtcgggggaggctctcctttctcgctcgcgcccttttttccctcgtttctttgaaagttgggtgttgagaagtgggaggttcggggtgggagggggagggtgtcagagggtagagagagagacagagagacagagacgggggagagaggaagagagagacggagggagagagggacagagagcgaggcgggcggcgcgagagagggagagcaggagggaggaggagggagaccgagggaggaggcggcgaggagagcgcgccggccgcggggcgggggggggggttggggggggcgggggggtggtttggaaaaatgactcagtaagttcagcgcgcccgctccggccggccctgcgcctcccgccgcgcccgggatgtattcgtccccgctctgcctcacccaggtacggtcctcgcccggccccccgccggcgcccccgcgccccccgcatcccagccccggagttttgaagcaggaggaggcgggacgaaaaaggcgcgcgtccctcccgccatccctgcccgggatgccccccgcgccgagggctggggtccggtggggggatgggtcaggctggggtaccccccccacacccttacctaccgcggaccccctacgcgggactcccgcccagcacccccaaccccgactctcgggacctctcccggatgtggggcttggtctgcagatttgcgtcccccccccacacaccgacgcactccgcacccccgccccgacactcggaaaggtcggggtgggggctggcccccctccagcaagggctctgcgggaagccccccgcctgcctctgagaggaatctagggggtcgtgattggaccctgggtctccccagctggagagaaagggacctctcatgtgttttccccgtgtccccccaccaaggttgtgcgggccgccctggccctcggtcgcctttccctcgttattggcccacgtgtgcatggagggggagggggcaggagaagttggaggcccaggagggggaagggtgctccggcggcccggctgggtcccccctcctttgcaagccccccagcaccgtcccggtattttcgctgcatcgattctggattctggattctggattctggagccgccgccgggaggagcgggaggcccggcgctccgggtctggcccgggcactgcggcgctgcggacgccctcgccagcccggcacctgccccgtcccctccccctccccctccccctcccgtagcctctcacccctggccgcactcccagactgccccggggccgagccttgtgcaatggccgagggggtgtgtggggagggggcggctccccccggggactccttccagcccaggctcccggggaccccgaggtctgcaagttccgttttctagaccgctgctttcctccttacgcagtgtgtctttaggctggagaggttctggcctcagtttcccctgaagtgaggtgcggctaaggccggttctggagaggggacagtatggcgggcaaactgtaaagtcccggcacgtggggggtgcgattccagcgagggccaggcccgtcttaagaagcactgtgtggggagtatatgagtccccggcttccgctccagggcatggtgcagtgagggaccccccacgccaggcatgctccttggtagggtctttctcaccggccccctgcagccgacagggaatgtgggagctggtgctgagggggtctgaggtctgtcctacctgtgatcccctgagtgaccttgggtaagtccctgtcccagcctcagtttccctttctgagcagctttggggggggggttcccgaagaaggcatctctttgaagttctccaagaacaactagggttcgagtgggcacgctgtgtgacctcgggcagcctttgaagtctctgggcttgtggggtgactgaggtgtccccgctctgtcctcaccagctggaaggagccatttgggagggctgagcggaggggaggctgttccaggctggggaggttggaaggctgcctgtgcaccctggaattcccccatcagggctggttgggagacatcctggttgctggggtgggttgggggttagtaagaaccccagtccaggctttgcctcagagaattgctaactcggcctcagtttctccaggaacagggcaaggaccagccaggagggctgtctgtggaaaccaaaaaacggagaggctaaaaactaaaaactatccaggggtgctgcgtgcaagagacagagatgagaagacagagacaggcagagagacagaggcagagagctcccaggccagagtggggacagcgagtcccaagtgcagggggctccctcctcccctgcgattctcctctctgccccgccctccaccccagccctgtagtggagctggggaccccctttccagtttgtcttcagcctgaatgtaatccccactgttcccccaaggcccagcctggtctggggtagccagtggggtgggctgggggactcagaaggaccctgagtgccccatgcaggagcctcccacccaagtcctggctgcctgactcagtttcccgaatcacgtcccctccgtttctctcatcttggtctctttttgtctgtctttctctctttctctctgtcttgctctgactctgtgtgtgtgtgtgtgtgtgtgtgtgtgtgtgtgtctgtttctccctgtctctccatctctgtctctccccgcctctgtttcactcccagtcactgttggtctctttgtgtctctctttctcatcctctgtctctctgatgtctcagtctctcccactgtctctgtctcttcatgtctatctcaccatccctttctcctctttgtctctgcatgtctctttgatgtgtctctgtctctctgtctctccctccctttgccttctttgtgtgtctgtccgatgtgtctctgtctgtttctctgtctctgtctctctgcccccttcctctctgtctctgtttctctccaatatgtctgtctgtctcttcatctctgtctcaccttccctttctcctctgtctctgcgtgtctccccttgccccctctctccctgtctctctctatctctgcatgtgtctccttactcctctctctctgtctctctctgtctctgggcctccctctcccccttttcccagctaattttacaacctgagcccaaccgaaaatagctcccttttagctgatccgacccggatccttctcgggagccgaggctggcggggggtggggggcatctcggtgccagcccgctctgtgccacccgggcccggcccgccgagtggggagtgggtgctggcggccctggggcattctgggagccccgggccgggctcagcggtgactcaagcgctttttcacttttactcttaagaggaactgtgtggagcccatggctcccataaatcctgccggcgggaaggccggcctccccgcgcctgctctgggcctccctccctgcctccctcccgctggcgccaccgccacgttagttattccgggtttggggccaagtccctcttggccgcagcgtggcggattccccgagccacctccatcccgccaccgggtccctgtctcattcgttcgttgtttccttcattcgttcgtcccatgccctctcggagcacaatgtgctttgctgccatttctccagcagggtaaccgaggctgggagaggctgtcctcccaccccagacccccgacctttgttggattttctagatcttccttaagcatctcctgggccctggggataggtgggggtgggggaggcagcagggcccaggcccagtgtaggttcttagagggagcttggggggtgcctaccaggagcagggggcctgcagcccctcagtgccgggagaggggctaagagtcagagagggccagggcctgcccgaggtggcacagtggggctggcagagctggggttcaggccattttccatctggcggcttgggcaggtgggcgctctctccccgtgtgccccccacccggggcctggtggcctctgattcactctctacaaggctccaccactctcccgctgtatctccctctgggtctctctgtgcatctctctctgtttctccccctcccctctctgcggcggaggtgcctctgcgcgccagggccaagcgccctgtaaatcaccaaagctgggattctggcagagtcagcgttctcctctctctctctctctctctctgtctccctccctttctccccccatctcgctctctcctcctctctccctctctccttctctgtctccctttccgtctttccctcttcctttctctctctctccccgtctcccttctctccctctctccttctctcttctctctctctttctccctccctacctccctctctgttcctcttctttctctctgtctgtctctttctttctccctcccttcctctctctctgttcctcctcttctttctctctctctgtctctctgagctggcctccctccctgtctcacaccaaatggatgggaaatgctgcctgggcctcctgccccggacacggcccgccccccactctcctgcctgtgtccacgccgacctcacctgggtgcccatctgccctgagcacacagcgtgcgggcacccaagtcctgaccagttcacatccatgagcacacgctgggcgcacacgcgtgcacactccctgacacccatacggacgaggacacagctctgcctgcctcggatctgccttgatgggggtcaccaacacacagacctagagtgcccctcacatctgcctgaaaatcttgctcaggaggtgccaaacccaatatagtacctggtatagagaaggtgccaaataactgctatagagtggtgccaaataagtgttgctgtgcttgtgattgttgctaaactaattctcctctttcctgactctggtgggtgacctgcccccacccccggaccgtttcttgccctgaaatgaagtcagcagaaacccccacttcctcagggctgctgcagattcagggaggcagcacaatttttttttttttttttttttgaggtagagtctcgctctgtcgcccaggctggagtgcagcggtgcgatcttggctcactgcagcctccggggaggcaggacatttctgaggtccacagtgcagggcttggtactcagtaggtgcccaataaatacctgttgcacgaatgaatgaatgaatgaatgaatgaatgaatgtttttggttgagaggcgggactttggtcttcccgagcctccatttctccgccaacataaaataaaaaacataatggcactttcctcagagacatcgatgtaccttagtccgacacctggtatacagtaggtgccaaataagtgctgctgtgcttatggttgttgctaaactagtaattgcattgaacaccccagaggcattttccagtttccctcccttccctctgtgtgtatttgcgcagcgtaagcccagctttgggctgggtgacaaggacagtggtgacctggaaaggcccaggctcagacccctctctactgtggcatttctgttagtttttcttttctttcttttttctttctctctccttccttccttccttccttccttccttccttccttccttccttccttccttccttccctccctccctccctccttccttctttccttctctttctctctctctccctctctctccctctctctctctctctctctctctctctctctctctctctctctcggagtcttgcactgtcgcccaggctggagtgcagtggcgtgatctcagctcactgcaacctccgcctcctgggttcacgcgattctcctacctcagcctcccaagtagctggaattacaggcacgtgccaccacgcctggctaacttttgtatttttagtagagacggggtttcaccatgttggccaggctggtctcaaactcctgacctcaggtgatccacctgcctcggcctcccaaagtgctgggattacaggcatgagccaccgtgcccggcctctgttagtcttttctccctgcccagccctgtccagggtctccctgagtttgaccagccctgtgtgggtaccagccttccttacacatgggggtgcatggataaggggggtcccagaggcagaagatgggagcattgcttcagtggtctggatgctggagatgctaacagatcaaagctgtgcccttgtgggaccgacagtctaggccgggtcggggacgggcaggaaacgaggtgaccaggactccttgaggatgtggtgtgcgaccgacctcggggatcaaacaaggggaagggaaccacgtgggactcggagagtgtgcacggtgcagaccaggtgtcactggacgctctggcccgagactgtttgctcaaggggcccaggagtggggtgggggggtgccaggaggcccagggaccagtcccagctcagttcctccctgactgtgtgactttggtggaagatttcatgcctcagtctcctcctcgaggtagtgggtgcaatgatagtccccactttcatagtagactttttttttttttgaaacagagtctcgctctgtcgcccagactagagtgcagtagcacaatctgggctcactgcaacctccgcctcccgggttcaagcgattttcccgcctcagcttcccaagtagatgggattgcaggtgtgtgtcaccgcacctggctaattttggtgtttttagtagagatggggtttcaccatgttggccaggctggtcttgaactcctgacctcaggtgatccgcccgcctcggcctcccaaagtgctgggattacaggtgtgagccaccgcgcccggcccctatttcgtagtagacgtgatagctcagcaaacgctcagcctgtaagaggcacagcctcgctccctgcctctctcctccacctcctggcccctctggctcagccctcattgtcctcccagaacatcaaggcacagagggaagtaggggacccagggttcattttgctgactcactgccttggcagagagtttgaaccctgtggactcagtttacccaaattcctcactgtggcccacaaggccctgcccagcctgtccttgtcccctcctcaaccctcccctcctctctctttcccccttgctcattctgctccagccacatgggcctcctcgctgttcctctaacacgccaggtgcggtcctgccccagggcctttgcatgacccatttctccatcagaaagctcctggcctggagtgccatctctcaagactttgttcaggtgtctcctcctgcaagagaccttcctggaccccccccccaagctaaaaaacaccccccaccccagagattctctggtccctcaaactcttaaatttcttcagagcactttgcccaacttgacgttttattacatattttgctgattttaaccatccgtccctgccccagatctggatccaggtgagggccgagcccaggtccctgccaagtcctcggcaccctacctgggaccggcatgcagcaggcactcactaaatgtttgctgagcaacagaatgaatcttccctctctgggagccgttcacatgtccacaggctgtgattttctgagccaggggaaggagcggcccaaggttagagcctgacgctggtgccggatgggcctggggttgtccgtgggaccatggacaagtcatccgacccggagaagaaggcattagaactaaggctttgaaggatgcgtaggaatttgggataagtgctaagtaggtaatgagctagattctcatgaaggattgttgagtcacttttacctggaaacttttggtttggaaattggagtttcttgtcctggtttgctggcctggactttcagggtgggaggagcacagggaggtgagtgagggcatcacccagtgcatggcgtggtcgttcagcaaggtcttgggtccagatgtctctcccagctgctgctgctctctttggccaggaagtcccagtgggctaagctggggtttccaggaaagacctagccttgttccccttctccccatcaccttgcaaggaacaaggtcaccaggcaagctcccctgtctccagcaggctgcaatattcctttctgcccattgtacagaatgagagactgaggcttatctgaggtgatctgttccccagccattcagatggtgaaaatagaccttactgtcacccagccaccttctccgacagtgggtgcctcaactctgggcctcaggattggagagggagaggtgatagaactggatggtcctggctagatctgggaaaccctgggttgaggaggaaaggctgcttgaaggaggggacactagagatagggcgttgagggatgtgtaggagtttgggaggattttcagcatctagcttgtcttggttatctcttttgccggttgggcctctgagggcagtaggaggtccctggggaagaggccctggttattgcaggtcatgtgggagaaacagagtgacaaccggccaaccaggccctgcctctcacgtggtctgatcccctggggaggacaagggaggatggggcagcaggtccatgacccagttacaagctgtttgtcttcctgcctctgtaactagccggggtcaccactgacgtgggcccccacccctgcccgcctccctggcacctgtccccggaaagggcacagagaaggggaggaacatagagaagggagggacagttagggaggaggaagggaactcagatctacgaggggccagatgagaaaaggaattaagaggagaggggaagtggggagggggaattcagagagagaggggggttggggagagaaggagttggggggacagtgatccctgcccccatcatggatgcctcccctgtcccttccagcagcctcttatcacagccccagtaagcgccagagcttgggtggcagccacggccccagctggacaacattgtccgggcctcctgcccgcctggcatctcctccacaggcaggtcctgcgcctctatgggtcctctctgccgcgtcccactgtgccccccaccacccccactgcccggcttccctggccagaccatctgggctctggtcccagctctgctgaccggctgtgtgaccctggacaaaccactccccatctctgggtctcatccagtcaggggcagggacgagattggacagggcctgggccgggccccctccacctcccctttgccttagcaggttggctggggaagcgggggcagcggaaaagggccctgaggtccggtccccgccgcagctgttacggtgactcacgctttgggggacattggggtgggggagcttcgctggtacaagctgactctggtctcactgggtggggaggctattttcagagcctcagtaataggtgaaatctgatgtcctgcccctccccccgaagcaccccacggccggaggtggcccaaggggacgtggagcacagagcagggagggtgatctggcagcagctgctctgcccatcccggcctggaaatgggaccgagtccagccacatccgctggcacacacagtgggagtccagggtcaacgtctccctaccttcctgagaccccaatcttacagagaacaggctgttctgagaaagggacccgtggccttccagggggtcagggccctgattcttatcctcacaccggccctgagaccctgtgggacctcagccaggtctccgcccctctctgagccttagtttccatgccacagaacacggagcggggcctcaggctgttccctgcttcctggaagattgtctgcaatcaaaatgatcatcgcagcaatcgcgtccatagtaatgaaaataccccagcatcttagaggggccgaggcgggaggatcgcttgagcccaggaattcgagaccagcctgggcaacatagcaagacccccatctctactaaaagtacaaaaattagctgggcatggtggcgcacctggaatcccagctactcgggaggctgagacatgagaatcgcctgaacccaggaggcggaggttgcagtgagctgagatcatgccaccgccctccagcctgggcaacagtgtgagacactgtctcaaaaaaaaaaaaaaaaaaaaaaaaaaaaaaaggaaagaaaatagaaaatatcccagtgccttaggaggccgaggtgggaggatcacttgagcccaggagtttgagaccggccaaggcaacacagtgagtgagactccatctctgcaaaaataaaaattagccagacatggtggtttgcacctgtagtcccagctactcaggaagctgacgtgggagaatcgcttgagtctgggagttcagggcccaagtgacctaagatcgtgccactgcactccagtgagacgcctgtcttttttatttatttatttatttattttgagacggagtctcgctcttgttgcccaggctggagtgcaatggcgcgaccttggctcactgcaacctctgcctcccgggttcaagtgattctcctgccttagcctcccgagtagctgggattacaggcgcctgtcaccatacctggctaattttttgtgtttttagtagagatggggtttcgccatgttggccaggctgatctcaaactcctgacctcagatgatccacccacctcggcctcccaaagtgctgggattacaggcgtgagccaccacaccaggctgagacccccatctcttaaaaaaaaaagtaataaaaatcacagtagccccagcactttgggaggccgaggcaggcggatcacgaggtcaggacattgagaccatcctggctaacacagtgaacccccgtctctactaaaaaaaaaaatacaaaaaattagttgggcatggtggcgggtgcctgtagtcccagctattcaggaggctgaggcaggagaatggcgtgaacccgggaggtagagtttgcagtgagctgagatcgcatcactgcactctagcctgggtgacagagcgagactctgtctcaaaaaaaaaaaaaaaaaaaaaaaatccaatagcaatataagttgtaatgataacaatcatcgcatcattaataacaatgtagtcctttgagagctggggggaggaaaacagctttctgtgctaggaagggatcacccctgtccgaaatgcccagcccagcctggtcaaggcagggagatggaaaggcagttttgcttctctttctcttcttgttccttgtatttattccaccttgaggctgagaaactaggtcccagatgtttttaatttgttttattttattttttatttttttagagacagggtcttactctatcccccaggctggagtgcagtggcacaatcacagctcactgcagcctcgacctctgaggctcaagtgatcctcccacctcagcctcctaagtagctaggactacaggtgtgcgccacagcaactatgcccaactaattatttttgtaatttttagtagagacggggtttcgacatgttggtcaggctgctctcaaacacttgggctcaagtgatctctccacctcggcctcccaagtagctgggactacagacgcgcaccacaaaaattatgcccagctaatttttgtaattttcgtaaagatagggttttgcctgccggccacagtggctcacacctgtaatcccagcactttgggaggcagaggcaggtggaccacctgaggtcaggagttcaagaccagcctggccaacatggtgaaaccccatctctactaaaaatacaaaaattagctgggcatgatagtgtgtggctgtaatagtgtgtgcctgtaatcccagctactcgggaggctgaggcaggagaatctcttgaacctgggaggcggaggttgcagtgagccgagattgtgccactgcactccagcctgggtgacaagagtgaaactctgtctcaaaaaaaaaaaaaaaaaaaaggagatggggtttcgccatgttgcccaggctgggattgaactgggctcaagtgatccacccacctcagcctcccaaagttctgggattacaggcgttagccatagtccccagctgagatcccaaatgctatgcagactcagtttcccttgctggaaaatgggaagaatgggaggggcctccccacacccagacagggagctgggggcctcccactgccccacatttctcttcaaggggctgctgttattttcgtggggaagtcagatgagtgcaggttccagtccacctctgtcccccatggccgggttccccctcaaggcctcagtttcctcatctgtagcatgggtgttgtgactgccctcagacaccaatttgtcatgatttgggagtaggttgaagtcccagctctggcccagtctcagcgccttcccagccctcggattttccatctccagggtgggtctgcagggaacggggtggcccctctccccagttctgaacctttgtggctgagcgtctgcttctctggtctgtttctgtatcagcacagtgggttcatggaaaggggaaaggagggagaggactccacccgggatttctcctccctctgattaatcctggtgcacttgaatctcttatcttttgatgcagaaatccccccacccttccagcagccctcaacctccaggcgggcctagtgtctgcctgtggatctcagccaggcctgtctgtacatatgctctgtaggaacaagctttcgtagtcattttttgtttttttgttttttgttttcccaagatggagtctcgccctgtcacccaggctggagtacagtggagtgaccttggctcactgcaacctccacctcccaggttcaagcaattctcctgcctcagcctcccaagtagctgggattacagtcatgcgccaccacgcctggctaatttttgtatttttagtagagacagagtttcaccatgttagccaggctggtcttgaactcctgacttcttgatctgcccgcctcggtctcccaaagtgctaggattacaggcatgaaccaccgcgcccagccgggttttttttttttgagacggagtctcactctgtcgcccaggctggaatgtagtggcgagctctcggctcactgcaacctctgcctcctgggttctcctgcctcagcctcctgagtagccgggactacaggcgtgtgccaccatgcccagctaatttttgtatttttagtaaagatggggtttcactatgttggccaggctggtgtcaagctcttgacctcaagcgatccacctgcctcagcctcccaaagtgctgggattacaggcgtgagccactgcgcccagcctcatttttcatttttttttatttctttctttttttttttttttttttttttgagtcaggagtcaggggtctcactacgttgtcacccgggctggagatcaatggcgcaaccttggctcactgcagccttgacctcctgggctcaattgatcttcccacctcagcctcccaagtagttgggactgcaggtatgcatcacctagctaagttttgattttgtagaaacggggcctcgctatgtcatccaggctggtcttgaactcctgggctcaagcagtccacccactgtggcctcccaaagtgctgggattacaggtgtgagccaccatgcttggccgccgaccctagtttttttttgttttgttttgttttttgagatggagtcttgctctgtcgcccaggctggagtgcagtggcgcaatctcggctcactgcaagctccgcctcccgggttcatgccaatctcctgcctcagcctcctgagtagctgggactacaggcgcccgacaccacgcccggctaatttttttgtttttttttcagtagagacggggtttcactgtgttagccaggatggtctcaatctcctgacctcgtgatctgcccgccttggcctcccaaagtgctgggattacaagcgtgagccaccgtgcccagccttgttctttttttttttttttttttttttttgagacagtgtttcactcttggcacccaggctcccaggctggagtgcagtggcacaatctgagctcactgcaacctctgcctcccaggttcaagcgattctcctgtctcagcctcctgagtagctgggattacaggtgtgctccaatatgcctggctacatttttttgtatttttagtagggacggggttttgccatgttggccgggctggtctcaagctcctaacctcaggtgatccacctgcttcggtctcccaaagtgctgggattacaggtgtgagccactgcgcccaggctttttttttttttttttttttttgtgacagtcttgctctgtcgcccaggctggagtgcagtggcaccatcacagctcactgcagcattaaactcctgggctcaaatgatcctcccaccccagcctcccaactagctgggactacagttgcaaaccaccatacctggctaatttttgtttttttgattttgtttgttcatttgttttgtagcgatggggttttaccatatggctcagactggtctcaaacttctgggctcaagcagtcctccctcctcggcctcccgaagcgctgggattacaagtgtgagccattacacccagcccaaccctagctgcaataggcagagaataggtccctgacatctttgttctcccaacctcagttttacccgtctgtacaatgggttgtccatgagcctccacctggcccccttagcttgctccatctgcatgctggggttcaacataggtcctccacggctgggcatggtggctcacacctgtcatcccagcacttggggaggccgagagccgaggcgggcggatcagaggtcaggagatcgagaccatcctggccaacatggtgaaaccccatctttcctaaaaatacaaaaattagctgggcgtggtggtgggcatctgtaatcctagctactcgggaggctgaggcaggagaatcgcttgaacccgggaggtggaggttgcagtgggccgagattgcgccactgcactccagccttagcgttaagagcaagactccgtctcaaaaaaaaaaaaaaaaaaaatgatcctccacaaacttccgccttgatttgtgcctctcacatagtccaagtctgtttgctcatctgggcgatgggttcttgcaggtccctgataaacttctcctgggtcccccgggccttttgcgtgcctccggcggcgtgcacgggtccgcagcgaccccctgcccacctctgcccagcccctcccactctgcgggtctgttcagggcccctccgacctcagccttcggggccgggcagtgggtccgccctctgcgtccctggcgctcctgacctctcgcctctccggcctgcaggatgagttccacccgttcatcgaggccctgctgcctcacgtccgcgccttcgcctacacctggttcaacctgcaggcgcggaagcgcaagtacttcaagaagcacgagaagcggatgtcgaaggacgaggagcgtgcggtcaaggacgagctgctgggcgagaagcccgaggtcaagcagaagtgggcgtcgcggctgctggccaagctgcgcaaggacatccggcccgagtgccgcgaggacttcgtgctgagcatcaccggcaagaaggcgccgggctgcgtgctctccaaccccgaccagaagggcaagatgcggcgcatcgactgtctccggcaggcggacaaggtgtggcggctggacctggtcatggtcatcctgttcaagggcatcccgctggagagcaccgacggcgagcgcctggtcaaggctgcgcagtgcggtcacccggtcctgtgcgtgcagccgcaccacattggcgtggccgtcaaggagctggacctctacctggcctacttcgtgcgtgagcgaggtgaggtgtggtggcctgagcggagcggccagcggggagggtgtctgatggtggtgacacggggccaggagggcctgagggaggaggccagtgcgtgtgggtatgatgtggtggtctgagaggggaagtgggccttggagagtgcccaatgggggcgacacggggcacggagcatctgagggaggaggctggtgggtatagatgtgatgtggtggtctgagaggggaggcgagtctaggagaatatgtaaagtaggtgatatggcacaaggagagtctgagagaggaggccagtgcatatagatgtgatgtggtggtccaggcagggcagcaggcctgggagagcatctgatgggggtgacatggtgcaaggagggtctgagggaggaggctggtgcgtgtagatgtgatgtggtggtccaagcggggaggcgggcctgggagagcgtctgacgccgggtgacacggggcaaggagggtctgagggaagaagccagcatgtgtagatgtgatgtggtggtctgaggggggaggcaggcctaggagagcgtctaatgcaagtgatatggtgcaaggagcgtctgagggaggaggccagtgcatgcagggcccagggtggctgctgatgggatgtggaggtcagatggaggaggcaggcctagcagaggtctcaagtgagagatggtacaaggaggtttttttgacagaggaggcaggtgggctgtggcgctccaatggtagaggcaggatctcaccctcacgtctgagggaggaggcaggaaggcccttgaggtctcagggggatgagaatgtcctagatggtcttgggcacaacggacggccttgctgggagcaggggtgaggagaggagagggacaggccatcccagccctccgaggagagccaagagagtcctggcaccgctttctgtgaatgcttgttggttgattgactctcagaccatgccagcagaggcctgatgagcctggccctgccagaggggtgtttgccggtggtcaaatgcctgatgttgagaccagctagctctgtggggttgaggaaatccaaggcggcttcccagaggaggaggtgcagctgagctcagctctgcaggatggccaggccacagtgaacaaggagatgccccaggggtcctggcaggagcgtggagatgagaggcctgatgcctgtgcctctggtcccggtgctaagagcagggttggtcctgcagcttcttggctgcgtggccctcttggacttcagtttctcttgcctgccaaatggtggagatgatcagtctgtagctggatggggctatgggaggttccagaagatcatgcgtgtagccacgtgcgaggtgtcagctgcatcccaagacctgagtgggtgcacagcacacccctgccatgcccatccaggccgtgtctggagcacgcgtgaacccccacacacccaggggctgccagagcatgtgggatgggtgtacgccagacgcagacccacacaggtcaccagcccagccccagcccaggcagcactctatagaaacaggcagttgcacagcctgagagggaggggcatttgcccgaacaggaggaccctggggccagactgcccatgctccagacacagcccttcttttccccagctgtatggacacatcccttttctgtgcctcagtttcctccttggtgcaatgggagtaacagccatgccaccttctagagctggtgcaagggtgagacagggtcacgggctcccaggctctagggtgtgtggaaagacagcagggcagagttacccagtgtttttttttttttttttttcctggagacagggtctcgctctgtcacccacgctggagtgcagtggtgcaatctcggctcactgtagcctcgacctcccaggctcaagcaatcctcctgcctcaccctcccaagtagctgggactataggcgcacaccaccacacccagctaatattttatatatatatatatttttttgtagagacagggtcttgctatgttgcccaggttggcctcaaactcctgggctcaagccatcctcccaccttggcctcccaaagtgttagaagtacagcaggcaagagccactgcaccacaccagttacccagtcttttttttttttctttctttttttggagatggagtttcgccctgttccccgggctggagtccagtgacgcaatctcggctcactgcaatctccacctcccaggttcaagcgattctcctgcctttgcctccccagtagctgggcttacaggtgactgccaccacgcctggctaatttttgtatttttagtagagacggggtttcaccatgttggccaggctggtcttgaactcctgaactcaaacgatccactggcctcagcctccccaagtgcggggattacaggcgtgagccaccgcgcccggcagttacccagtcttgatcttgattctttgaccttgaccttagcatctttctcctcccccacccccactgatgagcaacaaacctgctggggttggctgtgagggggcactggggacggtgggggcagagaggtgggccgggtgactgcctgttgggagcaggggccaccgtggggacggaggttctcatcgtcacacagggccagacctctctgccaccacacatcttcctcgcccggggccccgcccccacctcctccgtgctgagctgatacaattttgaagcgagcttttctgctgcagtcagcacaacctctgggcgcctccccacccccaccctgcccctcccgcctctgctcagcaggcaggcctgtgccccaggtcaggttggcctctctgagtgaaggctgcaccctcccttgcccccagcctgcccccttcatccccaagggaatccctgcttcaattggccccagcaggccacaccctcccccaattggccccagcagggcacacccccccccaaccctcccacctgcccactgcgggtgctccagctcctcatgggggtaagagctgggcctggactccaaccccagctcagctgcccactggctgggtgatgtggggccagtcactcaccctctctgtgcttcatttccttgtctataaactggggggctcaaaactggttgccttgtgggaaatgtcaagtgcccagggtgagagctcagtaaaccacccacaaggcatcgtgaagaccaggcactaggcagggggctagggcccttggtggttatcgttactaacattatcctcttcgggattggtttgtttgtttgttattattggtttgggttttttgggggtttttttggttgttgttgtttttttttttttttttgagacagactcttgctctgtctcccaggctggagtgcaatgacgcaatcttggctcactgcaacctctgcctcccgggttcaagcaattctcctgcctcagtctcccgagtagctgggactacacatgcccaccaccacacccggctaatttttgtatttttaatacggacggggttttgcatgttggccaggctggtctccagctcctaacttcaggtgatccacccgcctcggcctcccaaagtgctgggattacaggcgtgagccactgcaactggccttgttttttgttttttgcagagatggggtatcactatgttgcccaggctactctcgaactcctgggctcaagtgatcctcccgccttggcctcccaaagtgccaggattacaggcgtgaccccctgcgcccggcccatcctcctcattctgattataatctcccactgccagacctttccttatgcattccctggacatagaatgtctttcccatatggaaaaccccaactccggctgggtgtggtggctcatgcctgtaatcccagcactttgggaggccaaggcaggtgactctcctgagctcaggcattcgagaccagcctgggcaaaatggcaaaaccccatctctaccaaatatacaaaaaattagccacctgcctggctgaaaattctttcccattctcacagctgccctgtgaggcaaggatcattgctgtatgccttttttttttttttttttttttttttgagatagggtctcactctgtcacccaggctggagtgcagtggcgcgatcttggcttactgcaacctctacttcctgggttcaagcgattctcatgcctcagcctcccgagtagctgagattacaggcgagcgccaccacacctggccaatttttgtatttttagtagagacgggctttcaccatgttggccagggtggtctggaactcatggcctcaagtgatccgccctcctcggcctcccaaagtgctgggatgacaggcgtgagccaccgcgcccggcctgttgtacgcattttacagaggaggaaacagaggctcagaggagggatttgacctgccgtggtcacacagccgagactgggccaggtgggatttggacccacaagcagcttctgcctctgccctgtccttgacacctgcctcatcctccattattgtcagaaggggatgggcggaagttgtggtgcgtgagggggcagtctgctggcacggtgtggtcaccttctggcagggttgtgtgagggccccacaggctgaggtcttatgtagggtccccaggctgtggctggcctccaggcctcagcgctgatcccagtggttgtcaccctgacagcaggaagactggccaccggcttccttttccgaaccgagagtccccttggctgtggagcgtcctggcccagccagagtgcagtgtctggctttcatcagccctgctgggcagctgaggccctgggatagagggagagggagggacgggcatcaggcatagggccttggctggcctcttggaggggtgcagggtggatggcggtggaggggcacctgccatggggctgaaaggagccaccacttgcaacgtcacaagtgagagaggaggccgggcacagtggctcatacctgcaatcccagcacttcgggaggccgaggcaggcggatcacctgaggtcaggagtttgaggccagcctggccaacatggtgaaaccccatctctactaaaaatacaaaaattagccgggcgtggtggcgggcgtctgtagtaccagctactcgggaggctgaggcaggagaatcgctggaacccgggaggttgcagtgagccaagatcgcgacactgcactccagcctgagcgacagagtgagactctgtctcaaaaaataaaaattaaaattaataagaagagggtgtcagggaactgcaggaaaataaagcagggagggacatggaggggggctgggggccactctggatggggagggcttctctgaggaggcgtctttgaggtgaggcttgaagggggtgagggagtctggagaggctgggtggagggagcagtgagggggttatagccagtgcgaaggcctggagcccaggagcagcacatggagctggctgggatgttcagggggtagtgagtggcgagggccgtcctgtggccttccagtgagggtgaccagccgggggtggggcgggagagggtgacccgggtgctctccgacctgccacgtgctggggaaggagcctgcaggaaccagggcccagagagggaagctgtctgcccgcccagggcctaaacccagccaggcctccccgccccctctggcagcccaagaaatctgaggcgcgggcgggcaccgtgccagggctgggcgggggaggggctgccaggcccgcccgtcccagcagctgccagcccgccccgagccgccagcccagatggtgcccatctgctgacgccgccatgggccagcctcctgttcccgccttgcgtcgtgccaagctcctgcagtccagcgccgggaatggcgcggtgggcagagcccggcccgggaagctcatagcacgccagagaggctgccccgggtgccctggagagggtggcaggagaaacatgggagggggagttccccagcgcttcctggatggaattggggagcaaggaccccaacagcgataatgatggcggcaaacacacatggcgtgccctctgtgtgccaggctccgaggccaccgctcaccctaactggtttaattctctcccccatccaagcaggaagggactttggccttctctcgtgttctagtggaggaagcagagacccagaggtttggacaagagtcacttgtccaaggtcacaaagctcctcaggggcagagccggaatgagaatccagaacccctttgaaaaagggattgaggccaggcgaggtggctcctgcctgtaatcccaacactttgggaggctgaggcaggaggatcacttgaggccaggagttcgagaccagcctgggcaacatagcacgaccatgcccccccccaacaaaatttttaaaaatgagccaggtgtggtggtgtgtacctgtagtcccagctactcgggaggctgaggcaggaggatggcttgagcccaggagttggaggttgcagtgagctgtgatcccaccactgcactccagcctgggtgacaaggcaagaccttatctctaaaaaccgttttttttaaggggtgattgaggccaggtgtggtggctcacacatgtaatcccagctacacaggaggctgaggcaggagagtcgcttgaacctaggaggcggaggttgcagcgagctgagctcatgccactgcactccagcctgggcgacagagtgagaccctgtctccaataaaagggaggtggtattgaaaccccttaaacctcttttcaaaaacaaactaaaagtgccctttgaggttatctagtggaagccacaccctctgagtcatacagatcatacagtgcaggccgtgcacactcagggagtaaatgaatgaatgaatgaatgaatgaggtgaaccctatggaaggggaccaagcctggggccagggtgtccataaagctcaccctgagcttgatggcaggagaaagggtctcaacctgggagtgagggacctgggtcagccacagtgctgccctggcttgctgtgtggctttgagaaaagtcctgccctctctggtctggggttgaggggagtggagggtgggaaggggcggccttgtgggccacagacaggagcaaggcgggtcttcactgaaagcctcccgtcctcttctgcctttattgatcttcatcccggttgtgggtgctgcactggggagacaggccatgagctcgggtgacggtgcctgtttatttgtatggtggacagaatttgtgttcctgtgtgctccaggcagtgtggggcgcattcttctctttgagccttagtttttgcctctgtagaatggggagaatcagagctgtgcccattgcattaaagattggagtcagtggtctctgagaagcatacaggaggcactcaataaatgctcacttccggccgggcgcagtggctcacacctgtaatcccagcactctgggaggcccaggcgggtggatcacctgaggtcgggagttcgagaccagcctgaccaacatggagaaaccccatctctactaaaaataccaaaaattagccaggcgtggtggtgcatgcctgtaatcccagctagtcaggaggctaaggcaggagaattgcttgagcccgggagaaggaggttgcggtgaaccgagattgcgccattgcgctccagcctgggcaacaagagtgaaactctgtcccaaaaacaaaacaaacaaacaaaaagaatgctcatttcctccctggattctctccccaaccccaggagggaaggagggaggtcccagtgccgccgtgaaaccctacacctccttttcccaacccagtgagccagtgggggcaccgtgacccaggagtggctgtcaccagaagctggaccaagtcaccctttccaggtgtctggacagcagaggggtgaggggttcctggcagcagcagcctgttatcccccagggctgggcagccaggtgtgccagccgtctgtctgtgcagagaaggtggctgccgggcgtgagtcgcagacgccagctgatggtgtatttatagcaacggcaggagtccgcggggcatacgtcagtggtaaagagggacgggcaggtgggggtccagctcccacagcagacaagagcccaccaggactggccagggagctgaacagagtgtcagggagaatgaggggcatgttgtgcagccgggaggcccaggatcacacccctctgctctggaactgcgtgatgtttgacaagtgacattgcagctgtgggcctcagtttcctcccccatcaaatggggatgataataatcctgcccacctaatagggctgcataggatccaattagtgcatgaaaagcatgaggacagggcctggtatacagtaagcactcaaaagtgatttgttgcctaaaaaagggagggaatcccaacatgggccacaatgtggatgcatcttgaggatgtcacactcagtaaaataagccagacacagaaggacaaatcctgtgtgattccactcctaggaggtccatagagtcgccagattcacagagacagaaagtaggatggggggtgccaggggctggggagggggctggggagagaatgtttcatggggacggggtttcagtttgggaagatgagaaggttctggagaggatggtggtaatggttgtacaaccctatgaatacgcttaatgctgggttaatgccactgaacttagaaatggttaaaagagaggcaggaggattgcttaaggccaggagttcgagaccagcctgggcaacacagcgagacctcatctgtacaaaaaatttaaaaattatctgggtgtggttgcacgcacttgtgttcccatctactcaggaggctgaggcaggaggatcgcttgagcccaggagtttgaggctgcaatgagctatgatcacaccactgcactccagcctgggcgacagagcaagacttgtctcaaaaccagaaccacccccaccaaaaaatggtaaatttatgttatctagattttaccacaatctaaaaatgtagttctggttgtgaataatgataataacaagtaataatattatatctatggccggctgtggtggcttacgcctgtaatctcagcactttgggaggctgaggcgggaagatgacttgaggtcaagaattcgagaccagcccagccaacatggtaaaaccctgtctctaataaaaatacaaaaattagccagtcgtaggccaggcgcggtggctcacacctgtaatcccagcactttgggaggccgaggcaggcagaccacttgaggtcaagagtttgagaccagcctggccaatatggcaaaaccccgtctctactaaaaatacaaaaattagccaggcatggtggcgcgtgcctgtaatcccagctacttgggaggctgaggcaggagaatcacttgaacccgggaggcggaggttgcggtgagctgagattgcaccactgccctccagcctgggcaacagagtgagactccgtttcaaaaaaaaatgttatatatgtaacaatgtaataattagtaatatgtcatatataatcatggaacaataaataagaaaaatagtgtctgcggtgacagcacagtagttattattgtcgttatcatgatcgtcatcactgtggttctcgtccagctctgccctgcagacagctgtgtaaccctgggtgagtttcttgccagctctgtgctttactgcctcatctgtgaattgagcatagggggtgcctagcaatttaaatgagataatagctcttttttttttttttttttttttgagatggagtcttgctctgtctcccaggcaggagtgcagtggtgtgatcgtggctcactgcaacctccacctcccgggttcaagtgattctcctgcctcaacctcccgaatagctgggattacaagctcatgtcaccacacccggctaattgtggtatttttagtagagcgggggtttcactatgttggccaggctggtctcgaacttctgacctcaggtgatctacctgccttggcctcccaaagtgctgggactacaggcgtgagccaccgcacccggcctaaatgagataatatctatgaaaaaactaaccctttgcatgtgatgagtgctgggaactggtaggctctttgaggagtaggtcctcccaccaccccgcagacgcccctacccagcagaatgctggtttctgcatgaatgcatttgtgtggggactcccgagacagcccctgagggagccctcattcacccgggtggggcccggccctcccagagccagtgggagggggaggcgccttgttgcacctgtgatgccccccgttatggctgggctgcagttgtcaccctggccctgtgcctgggaagccaaggggaggctgagggcagctagggacagctctgtgcccacggccccctccagccagctgccaggccagccccctccctccagctgggcgagggcaggaagtcacagatggtcagggttggtgaggggtgaagcagagggcatttggggacaccggatgtctcgtccagatggggaaactgaggcccggagaggggcgaggcattgccccgagttgcccaggaagggccttggctcttgtcccttctaagtcccatctttatttttattttttattttttggagacggagttttgccctgtcgcccaggctggagtacagtggcgcgatctcggctcgctgcaacctccgcctcctgagttcaagcaattctcccgcctcagcctcccgagtagctgggattacaggtgcccgccaccacacccagctaatttttgtatttttagtagagatggagttttaccatgttggccaggctgacctcgtgatccacccacctcggcctcccgaattgctgggattacaggtgtgagccaccgcgcccagactaagtcccatctttaggtccgcttggctgttccacggccacctggaggggaggtagggccagcaaggagggaccctagggtctcagggcagaagatctgccggaggagagggagaagggggttctgaggggaggaagacgcgagaatctcaacgctgaagtggtttctagattctccagggcatgagtcctgaaatccccaaggcctgagttctagaatttcttccactggggccctgaccacacaggtgattctagaattctcctaggtgagttccagacccaggggtccaggagaaatagaatgttggctgggcgtggtggctcacacctgtaatcccagcactttgggagaccgaggagggcagatcacttgaggtcaggatttcaagaccagcctgaccaacatgatgaaacccggtctctactaaaaatacaaaaatgagccgggcgtggtggcgcgaacctgtaatcccagctactctcaggaggctgagacaggagaatcgcttaaacccaggaggcagaggctacagtgagctgggatcgtgccactgcactccagcctgggcaacagagtgagactctgtctcaaaaaaaaaaaaaaaaaaaaagagttccaaccacacatataatttaacatttttctggtcctcacacttaagaatgtaaatttaagtatactggggaaattaattttaacattattttaagtaatgttaattttttttttccttgagacagagtctcgctctgtcgcccaggctggagtgcagcggtgcaatctcggctcactgcaacctccacctcctgggttcaagcagttctcctgcctcagcctcccgagtagctgcctcagcttcccgagtagtaacattaaaatgtttaattttaacattactttatttaacccagggcatctggaatgatactattgcaatccataaacaacaggaaaaattattggtctattggtcgggtgcagtggctcacgcctggaatcccagccctttgggaggctgaggtgggaggatcacttgaggtcaggagtttgagaccagcctggccaacatactaagaccttgtctctacaaaaaaattaaaaaattagccaggcgtggtggcgtgaacctgcggtcccagctactcaggaggctgaggtgggaagatcgcttgagcccaggaatgtggggctccagcgagctgtgattgtgtcactgcattccagcctgggtgacagagcaagacttcaactcaaaaaaaaagttatcgaggtattttatgatcttttccccacccaccccccacccgcttacactaagtctgaaatttggacagaccacatttcaagcactggatgtcacacgtggccaggggctgctgtattgggcaggccgtgctaagacatctgagttccagagcaggggttcccgacccccgggccacagacgggttccgtgcctgggaggaacctggccactcagcaggagttgagcttagggcaagtgaccattctcacctgagctccacctcccgtcagatcagcgggcggctctgggtgcccctacgagcatgaaccccatggtgaactgaacataggagggatccaggttgcgtgctccttaggagaatctgactaatgtctaatgtctagtttcatcccagaaccatctccccactcaccccgtccctggaaaaattgtcttccatgaaatcggtccctggggccaagaaggttggaggctgctgttccagagaattcggaagcagatctccagtctcccaagttgggttctcgaaaacgtgagggcaggttctagaccttccaaactggttgcttgaaaatccaaggaggctgggcgcggtggctcacacctgtcatcccagcactttgggaagccgagacgggcggatctcccgaggtcaggagttcgagaccagcctggccaacgtggtgaaaccccatctctactaaaaatacaaaaatcagccaggtgtggtggtgcacacctgtaatcccagctactggggaggctgaggcaggagaatcacttcaatccgggaggcagaggctgcagtcagcagagatcgcaccactgtactccagcctgggcaacagagtgagaatctaactcttttgcccagactggagttcagtggtgcaatcacagctcactgcagccttcaactcccaggttcaagtgatcctcccaccttagcctcctaagtcgctggggctgggattacaggcgcataccaccatggttgattttttttttttttttttagtagagatgaggtctcactatgttgcccaggctggagtgctgtggtggactcatagctcactgcagcctcaatctctcaggctcaagggatcctcctgcttcagcctcccaggtagctggcagtataggcgtgcaccactacgcctggctgattttttatttttatttatttatttatttactttttgagacggagtcttgctttgtcacccaggctggagtgcagtggcgcaatcttggctcactgcaacctccacctcccgggttcaagcgattctcctgcctcagcctcccgagtacctgggattacaggcgcgtgccaccacaccggctaatttttgtatttttagtagagatgggatttctccatgttggccaggctggtcttgaactcctgacctcgggtcccaaagtgctgggatgacaggcatgaactaccatgcccggccttatttttatttttcgtagacaggaggtctcactatgtggcccatgctgggatttcaggctctttgagctttcttccatattggttagggctggagcaggactccactgtggcgggaggtatttgggcgcaaggagagcagttgtgaggactggtggtgacccccagttactgtctgttgtgctttggatgctgggcacgggaagcctggctgtaagtgtgtgtttccgggccgggcgcggcggctcacgcctataatcccagcactttgggaggctgaggtatgcggatcacgaggtgaggagatccagaccatcctggctaacgtggtgaaaccccgtctctactaaaaatatgaaaatattagccaggcgtggtggtgggcgcctgtagtcccagctactcgggaggctgagagaggagaatggtgtggacctgggaggcggagcttgcagtgagctgagatcgtgccactgcactccagccggggcaacagagtgagactccgtctcaaaaaaaaaaaaaaaaaaaagtgtgtgtttccaagaggctgttatggggcctcgggcacaccctcactgggtctggatcccagcctgtctaccaccaggcgtcccttctggtgaacagagctatgtgagaacttccaacagggacaccacggccgctcgtagcccagagcttgcagagctttgttcaaaggcaatggcccagggccgagcacggcggctcacacctgtaatcccagcacttgcagaggccaaggtgggtggatcacctgagatcaggagttcgagaccagtctggccaacatggcaaaaccctatctctactaaacctacaaaaattagctgggtgtggtggcacatgcttgtagtctcagctactcgggaggctgaggcaggagaatcgcttgaacccaggaggcagaggttgcggtgagctgagatcgcgccattgcactccagcctggtgacagagtgagactccatctcaaacaaacaaacaaacaaaaaagcagtggccatcatgatcggttgtgtcatctagtgggaggcaggggtgtgtctgcatgcgtgtctggggtgcattgtggggggattgcaggcgtattgagggcttaccaagtgcctggctcatctgagccctcaggaaaccacattgttggcagctacctcaccgtctcacaaccacccgctgaggttggaatgatcattaacagcatttaacagatggggaaactgaggcctagagaggcaaagtcactggcctaaggtcacatagctaaggagcacagtcaggatttaaatccaagcctgggagatcccaggacccacagtgggcaccacataaaggggctgtttggggtatggcagggactgccctggaacgttccggatcctgcctttgggcctacagggctttggtgccggtgagcaggccgcaggttcagctggctcaaggagcagcttcagggctgcagccaggctgggggctgggcaggtctcaaacccctggacctggggaatcagggaggtgtgagctgcatctgaggtcgggtgtctctgtgactctgtctctgtctctctacctctgattctccccaggctgccttgtctcagtccctgtctattcccaccccacctcgctctctctcccggccttgcgagtctcctcccagccccccatcccacccagtgggctgcccggaggtggcggcaacggggcagctgaatgggcctcttgttcctggccacacccgccccttggggtcaccctgggacatgcccaggcagcgtggctaccttaaagggccagtgctcagaaagaatgtgagcgggggaggctgcgtccactcccaaatcccacaccctccccaaggtggaccactcatgtgtctgacgggggtggggagctgtgtacctacacaccctcgtggcttgggggaggcctgtctggagcaggagatgtgatagggtttgggtttgaccttggataaatcccttcatctctctgtgcctcagtttccccatctagatcagggggctccttggtgccacccctgtgggttgctgggcagatggcatattatccaggattttgcacacagttgacactcttccggcgcccactgtgcattgatagagcacctgctgtttcagcccagcattcatccgccgtgcagacttggcaattccttcttcaccttgctccgtgcctcagtttccccaaatgcagaatgaggcgatggctgtcttagcttcacagagagctacgcaaggattgagtcggttcgtggaattagagggtattagggagaagggcctgaaacactgccaagtgtcacctccactggcgcacttattgagcgccagctgcataccaggccttgctgaggaagcctcactgcagaggttgcagtgagctgagaggcaaaggccacccagcctggatctcactctggtgtcatcgcctcctccctctgctcagggttgtgcagcttcaggctgctcccctgccctctctgggcctcagtttcaccttcagagcaacgggaacagccccatcctttcacacactggaaaccatcaccttcttctgcctgggagggggttgtgctgtctctgggaatcccaggcatcccccaggcaggagtcaacccagaggccctcggacccgggctgtaccctgtgacagctccgggtggctacgacgctcccgtgctccaggccagccccacagacagcccgggacaggttgctgccggatggacaagcctgtgcctcgctgccttatgtaaccagtttatgcaagggcagccggcccgcttacataaggggaggccgggccagcgcccagctggggagggggaggctcttaaagggaccggcgtcccccgcggctccctccacgggcactggtgcgaattcataggcgagctgcggactccgccctcagcaaggccgccattaatgtcgttatgattatttttgtggatgttgtttatcatcactatattctttccccagggcgggggttcagctgagcggaggaccacgcccagtgcttgggcagaggcttgggctgtgacgctggctctgggtgtcacctggttaagtccctgtctctgagcctcagcctccccttctgcacagtggggcaatgcaggaagacgtgaggtcctggagggtcctggccctgctgcctgttcactgtgtggcctcaggcaggtggcatcccctctctgggcctcagtttccccatctataaaatagcgcctgctctgtggggttgctgagggagagtcaataagacatattaagagtttacatgcccgccaggcatggtggctcacacctgtaatcccagcgctttgagaggctgagacgggaggatcacttgaggccaggagttcaagaccagcctgggcaacatagtgagatgcccatctctacaaaaaataaaacttagccaggcatggtgatgtgtgcctgtagccccagccactcgagaggtcgcggcaggaggattgctcaagtctgggaggttgaggctgcagtgagctgtgattgggccactgcactccagcctgggtgacagagcaacaccctgtctcaaaaaataaaaataggccaggcatggtggctcatgcctataatcccagcactttgggaagccgaggaagacagatcacttgagatcaagagttccagaccagcctggccaacaaggggaaaccccgtctctactaaaaatacaaaaattagctgggcgtgtggtgggagcctgtaatcccagctactggggaggctgaggcagaagaatcacttgaacctgggaggcggagattgtagtgagccgagatcgtgccactgcactctagcctgggtgacagagcaagactccatctcaaaaaataaataagtaaataaaaataaaaataggctgggcacagtgactcacacctctaatcccagccctttgggaggctgaggcgggaggatcgcttgagcccaggagtttgagaccagcctgggcaacatagcaaatctctgtctcaaaaatttttgaaaacaaaagagtttaggacagcacggagcacagacactgtcagcactcatccagtggaaccactttgcagccaataaatatttagtaagctcctactgtatgccaggcactgctccaggcgctgggatactgcagtgaacaggacagataaaaattcggccctggccaggcacggtggctcacacctgtaatcccagcactttgggaggctgaggtgggcggatcatgaggtcaggagatcgagaccatcctggctaacatggtgaaaccccgtctctactaaaaatacaaaaaaaattagccaggcgtgatggcaggtgcctgttgtcccagatcctcaggaggctgaggcaggagaatggtgtgaacctgggaggcggagcttgcagtgagccgagatcacgccactgcactccagcctgggtgacagagtgagactctgtctcagaaaaaaaaaaattctgccctcgtggaactcacagtttggttcaggcgatgggcaaagaacaagaaataaatgtcagtttaggcttagtgcggtggctcacgcctgtcatcccagcactgtggggggccgaggcgggcagatcacctgaggtcaggagttcaagaccagcctggccaacatggtgaaaccccgttcctactaaaaatacaaaacattagccaggcatagcggtatgcgcctgtaatccagccactggcaggggctgaggcaggagaatcgcttgaacccggaaggcggaggttgcagtgagccgagattgtaccactacactccagctggggccacagagcgagactccgtctcaaaaaataataataataaaaataaaaagaaataaatgtcagtttagcgataaggactatcaagaaaaataaagaaggccaaaggaaaagaggctgatgggctgtgctggggaggtccctgaaaggctgtctgaggacctgacatttgagctgagacctgagaagtgaggaggaaccagttatatgaagaactgggggaaggcgttccaggcagagggcacagcccgtgcaaaggccctgcggcaggacacacctggcactttggaggaacagtgaggaggcctgtgtggctgcagcagagtgaggagaggaagagaaggaggaggggagggcagtttgtgcaaggcctggtgggcagtaggaaggacttgggctttgaccccaaggcaggtgggagccatagagggctatgggcagaggagggaccagccctgactcaggtgctcacaggcaccctctgcctgctgcagggaggacagactgtggggggtgagggcaggagctggggaccagggcagagtggaccgccctggtgcaagcaggcggtagcagggacagaggcagaggagggggcagaatccaggtcaactccgacggtgtgaggattcagttgctcacctgggtcgtttataccttatctgaggctggcccttgctctccttgccccgtctcctgcctgcaagccgcacctgcctgggcacatgcagggaagggagcggcgcagcactgggcacgcctgggagctctcctgcaatcaggactttgttagcgggcaagctgggatatgggtcctggtgcccgggaggcccgtggggctctgggctcctgccagggtcccagccctaacccaggtacgccacccacatggcagggttattctctttttttttctctttttttagacagagtctcgctctgtcacccaggctggagtgcagtggtgcgatctcagctcactacaacctctgcctcacaggtttaagagattctcctgcctcagcctcctgagtagctgggactacaagtgtgcaccacctcacccagctaatttttgtgtttttagtagagacggagttgcaccatgttggccaggctggtctcaaactcctgaactcaattgatccaaccgcctcgacctcccaaagttctaggattacaggtgtgaaccaccgtacccagcctattctcatttattttctttcttatttttttttcttttttttgagacgaagtctcactctgtcacccaggctgaagtgcagtggcacgatctcagctgactgcaacctccgcctccagggttcaagcaattctcctgcctcagcctcccaagtagctgggactacaggcatgtgccactatagccagctaatttttgtatttttagtagagatggggctttgtcatgttgacgaccaggcaagtctcgaatgcctgacctcaggtgatccacccagcctcagcctcccacagtgctgggattacaggctggagccactgcgcccagacggtccttccttttcatgcctcctccttccactcccccatgtaccatgtctccttgtctctctttttctctctgctcatccctccctctcaactttctttctacaaatatttattgagcacctagtctgtatcaggccttattctagccactgagggcacaacagagatctagacagacaaagcctctgccctcaaggaggtgacattccactggggagatgagcaaacacccgtgcagtcactaagcaactaagcaaatccataggcaatcactaacttcctctgaaggaaagaaaacagaaggctgagattgagggtagccagaggctgcttgaggtgaaggggctcagcgtagacctctctgagaagggagcatttgagctgagaccaggagagatctcaagagagagcaagcagttagctgtttagacagagggaacagaatgtgcaaaggccctgaggcaggactgggccaggtgcattggaggaacagcgaggaggcccctgtggctggagcagagtgagtgagggggagagagggaagaggggagggcagaaagcggacaggacaggttgtgcagggcctgtggtcctagtcctccactttgactactcccccaaatctcttaatgttcctcacattcctttccctgacaagcatttattttgcacctgctgtataccagatcctatcaggagaatcccaaatattcatgcaacaagttcatattgggtgcctactgtgtgccaggctctgctggaataatcacactcatttggctgcaggcatttattgagtgccagctgtgtaaaagcatttatcgagcaccacctgtgtagcaggctctggggagagaggccacatgaaagcttgggaaggagaaagtttccttctaccccctttcaggtttgtgccctctggtttccagccccctcccacattcaaggcaacatttaaacctctgggttcaagttccgttgtccaactgcgtggccgtgagatctgcggcaagccccttcctctctcggatcttccgtttccccctttgtaaagcagaacactccacaatctgatgtgtttacaacttgacatctactttttgcagcaagggaaactgaggcacagagcagggcggagatgtgtctacctctccctccccaagcaagactggcatggagtctattctcctgaccccacgccaaagccagggcgtttggtattttgttttttcttggaggcccagagaggggcagggcttgcctgaagccacacagcaccgggcaggcctcggaattgcggagagccctcccctgggcgcctgcccgggctcccgcgccttcctcctgcctcctttggctgggccgccagccttgcctcccgtcctccggactccccgcgggctgcccagttggagacgcgccccaagaaatatcagaaggaaggggaagccgggaggggcctccgcctcctcccgccaccccccgccgcgcccggctgcccccacccggtgcccgacattggcagagagtgtcctcgggcgcttccgactggccctgcctgcttcgtgtggccactgatcccttccggagcctctccatggggacgcccgtgtgtgcgctcagccagtggcacatgtggctcccggggctcccttctccacccccccagcccctggcctgcccctttccccccatcccttcccgaacctctccatggggacgcgtgcgtgtgcgttcagcccgtgggcacatgtggctcccagggctccccccgaggcctgcccttctcccccccccgtcacagccgccgagtcaggcctgccaggaaggtgttgggggtgggggtgtggggaggcctcagcttggctgctgggaagccaagaatttgctccaaatgtaaacagcgagttattttcagtccactcccccccaccccgggtggcgttgacacatttgacattggcgggaccgggagggggtgggggtgagggtgtgcgtgcgggtatttttaaccttgctcctcacatccctggagtggctggtgccgagtggcagataatggggagggggcgcggaggcgtggggagccctgggtggccgtgcgcgggtgggcgcttggcaaggccgccctgctgttggcaccacgtgtttaacccctcagaggctgcagaggggctgggggaggcggcccagggcccagtggtgccccagaggctcccttgtcaccttctcctggtgtccccccacccccaccccacccaggagggcagggccgggtgcccgaggccggtgccagcctgcgccgcccagacctacaaaatggccgccaaggccggagaaacatctggaacaggggaagggagaggcgagaaaatggccgccagagggatgatgtcatgggcggcgtggcctcccagagcgtccccagcacggggcgagtccctacgcgcaggcctccgagcaggggccctgcggcctccagggacctccagacccgctgcccaggccggacacccacaaagagtgacaccggggtccccaggggtccccagaggcgggcccgagacctgggggagggcgaggccagcactgggcctccagtcccaacagcccgatgctggggacggttccggggcggtggtggccgctgacctgacccgcaggacaccgaggcgtccaccagcgcccgggagggcccggagccaggccatggagccggcgggggccgggtggaaagaaaaaagaaacttttctttgaaagtgattccgaagcaggttggctccggcccaggcggcccggcggcaggggagagggagatggaaagtatgggccagacttaaggaacgcaggaaggacgaggccggggaggcccgggatggaggccagcgtcctggaggtcaccccgtccacgcctctgcctctcgggcccccccaggtcacatccagattttcctccctgtccctggggcgggcggggagtgcggagaacatctatgggcttgtgttttttcctcttttgatttgtccagacaggcgatggacaagggctgggcaggggttttaggtcatctgcactgtcaggatgtggaggctcagagagggagagtgcttttagtgaggtcacacagcactggcaaaactgacagctgcttccctccttagagcatcttggggaggaggaagttctctatggaggatcagggtccgtactggaattcctttctatttttatttaatttaatttatttatttatttatttatttttgagatggagtttcactcttgttgcctaggctggagtgcaatggcacgatctcggctcactgcaacctccacctcctgagttcaagcgattctcctgtctcagcctcttgagtaactgggattacaggtgcctgccactacacccagctaatttttttgtatttttagtagagacaggggtctcaccatgttggccaggctggtctcgaactcctgacctcaggtgatctgcctgccttggcctcccaaagtgctgggattatacgtgtgagccaccgcgcccggcccctttttctttttctttcttcctttctttttttgaaacagagtcctcctgctctgtcacccaggctggagtgcagtgacttgatcatggcttactgtagcctcaaccttctgggctcaagcaatcctctcacttcagcctcctgagtagctgggaccacaggcatgtaccaccatgcccagctaaatttgggttttgtttgtttgtttgagacagagtctcactctgttgcccaggctggagtgcaatggcacgattttggctcactgcaacctccacctcccaggttcaagcgattctcctgcctcagccttccaagtagctgggattacaggcacccgccacgatgccctgctaattttttgtgtttttagtagagatggggttttgccatgttgcccaggctggtctcgaacttctgacctcaagtgatccgcctgccttggcctcccatagtgctgggattacaggcatgagccaccgtgccctgcctatttttttttttttgtagaaatagggtctcactatgttgctcaagctggtctcgaacttctgacctcaagtgatcctcttgccttggcttcccaaagtgttgggattacagcgtgagccactgtgtccagccaatgtctgtgtgtttttcactgctctgtccccagtacctaggacagggcatggtacacagtaggcgctcaagacgtgtgttggataaaagcatcacagttttctcctgaggctggggttggcacagatgctggcacaggaagggggcagaggctcaggaaatgcaaagtaggttgcaacgtaactggacacacacgggaaccctgtggtcacatttttcaggagggatgtgaggaggcgaaaactcaaacttccctcacttcaagtgcagattctgtgccgggagctgtggacgataaaccacatttgaacagaagcctgaataaagcgagagagtgagccaggcaggcatttgcagggacggtgttccaagcagtgtgcacagcccgtgcaaaggccctgaggcaggaccgtgcctggtgcattggtggaacagccaggaggcctgtgtggctggagcagagtgagcgagggggagagagggacgaggggaggaggggagggagggggcagaggcgggctgtgcagggccttgagcgccatggggagatggggagaacttggacttttagatatttggttttctgttttttgttttttgtttttgaggtggagtctcgctctgtcgcccaggctggagtgcagtggtgcgatctcggctcactgcaagctctgcctcccgggttcacgccattctcctgcctcagcctcccgagtagctgggactacaggcgcccgccaccacgcccggctatagttttgtatttttagtagagacggggtttcactgtgttagccaggatggtctcgatctcctgacctcgtgatccacccgcctcggcctcccaaagtgctgggattacaggcgtgagccaccgcgcccggcccaattgtttggttttgtttttgctttgttgttgttgtttttgagatggagtctcgctctgtcacccaggctggagtcactggtgcaatcttggttcaccgtgccctctgcctcccgggttcgagcaattctcctgcctcagcctcctgagcatctgggattacaggcatgcaccaccacgcctggctaatttttgtgtttttagcagagacgaggtttccgccatgttggtcaggctgagctggaactcctgaccttgtgatctgctcgccttggcctcccaaagtgctgggattacagacgtgagccaccgcgcccgggtgaactttcacatatttgtagacccagacacagtccagggtgctggggactagaacaaacgtttgcagaaagggctggggagggtgttccagagaaggagatgtcagagctgggctgcaaagtatggctggaggtttcctaggagggagaggggcagggaagacggcacagcaggagctcagaggactcaggcccaggtcactcgtatattccattgccttccaggacagagaaagttgaaccttcgccgggtaatgtttaaaaatggccggtgacacccagtagctgggaattccagggcctggctttggttctctctttagctggctgaggttgggaggcggacgtggcagccggcagagccagcaacatttggaagccggctaacgttggaaaatcaaccaggcgagctcacggtggcggccgatgctggaaacctgggctccgtgaggtccagcagatgccctgctggggcccaagtggacattctaggccttctgacagcccgccgggtttttaaataagtgtgattatggtttcagcaagtcctgtccttcctacagccaaaagatcaattcaatatggccactccgtgcaatgctgggccacccctgctgggccagggtgttgtgttgaagccaagattcccaacacctgagagtccagaagtttctttaaaaattgctttaactgtggtgagacacacatcacacactttttttttcttgagacagggtttcactctgtcacccaggctggagtgcagtggcactgtcatagctcatcgcagcctcaaactcccaggctcaagcaatcctcgcacctcagcctcctgagcatctgggaccacacatgcagcacgcaccaccacacccagctaatttttattttattttattttatttttgagacggagtctcactctgtcgcgccaactcggctcactacaacctccgcctcctgggttcaagcagttctcctgcctcagcctcccgagtagctgggactataggcgaccgccaccacacctggctaatttttgtatttttagtagagacaaggtttcaccatgttgaccaggttggtctcgaactcctgaccttgtgatcccaaagtgctgggattataggcgtgagccaccgcccctggctgacacccggctaatttttaaaaatattttgtagagatggggtcttgctatgtggtccaggctggtctcgaactccttgcctcaagtgatcctcccacttcagcctcccaaagtgctggaattacaggtgtgagccactgtgcccggcccagagacttttgaaagtctaaaatggattgtatcatagctcacatcactcctcttcccactgcaggataaaacccaggcctctcactgcaacacacaaggccccgaatggtcccgctcccctctccgttcgttcctctttctcttgcccaccacgctgcagcctggggtctgtctctgcctttcacacatccaacttcattcctgccccgtggaccttgcccttgtcaccgaacctttgtggaacgctttcaccccagctctccacatggctgggctccttctcccgctggagagccaccgtcacatcctcagagaggttctgcctgagtcctccctccaacgccgcccccaaagccattctgccttccgccagtttcattgcctccgtagaacctagaaccgtgtgaaatgatctgaggcttcctccatgcactggttctgcccgtctccctccccacttccttctctgccatccccccaaggcctggcgagtagtaggtggtcagtaaacacctgttccgtgagtgccgggtgtgcgttgacctcccagtcaccaacggcggaagcttcagccagcggacgcagggagttgtcccttgcaaagggggtgggtgctcccgggcgggaagggtggggccagagcccacggcgatgcctttgtcatgagctaggatggactgaatttgggctcacagccacggacaggagagaacagtgtgtccgccccgtcagtgccatccagcgtgcgtggctgttgtgcatcatttgtttgcttgagcaaaggctacagggtccagtgacattcttggcagtccatgacacctcacagacctgggaagtcaagagacctggctcccggccagatgagggtatcatttgaaatacaatttgctggccggctgcggtggctcgcacctgtgtttcccctactttgggagacagaggtgggaggattgcttgagcccaggagtttgagtccagcctgggcaacatagcgagactgcgtctctactttttttttttcctgagacggagtctcgctcctttgcacaggctggagtgcagtggttcgatctcggctcactgcaagctccgcctcccgggttcacgccattctcctgcctcagcctcccgagtagctgggactacaggcgcctgccaccacgcccggctttttttttgtatttttaatagagacggggttttaccgtgttagctaggagaacaacaatttgctttccagaaccagagcctctcaacactagcatgtgtgtggtcatccatgctaaatggtgctgaaagaggcatttgtgtctctctgagaaggagctatttgaggaaagtcctgaatgaggggagagaatgagccatgtagatagctgagggaacagtgttccaggcagaggcgcagcccgtgcaaaggccctgaggcaggaccatgcctggtgtgttggaggaacagcgaggaggcccccgtggctagagcagagtgaggaaggggagacaggaaggaggggagggcagggaggggactgatcgggccatgcagggccttgtgggccacgggaagaaggtgggcttttccccgcaaagaaggtgggagctatggagggctgcgggcagaggaggggtaatgttcatttaactcctggagtttgacaaaatgctatcatcaaaacagactttatcacagaacctctagctatccccgtcccctccgtaagctcctctgagcatagcaacagaacgggaaggtaaggcagcgattggaaacgcccgcgttatagatgagcggagagccgctggaggttggaggctccgacagaggaggtgactggtccagagccacatggccaggttgtgctggggctggaactccatcgaacgcaggtttcagggtgcagcccttgtttccataagataccccaaaatcagacaagcctgggacttgccacctcttctttaaaaaccccagtgctgtttttgttgttttttttgagatagggtctccctctgttgcccaggctggagtgcagtggctcaatcatagctcacccactgcagccttgacctcctgggctcaagcagtcctcctgcctcagcctcttgagtagctgatactacaggtgtgcatcaccacagccaggtaacttttttttttaaagtagagatggggtggggtatcctgtattgcccaggcttgtctcaaactcctgagctcaagtaatcctccctccttgaccttccaaagtgcaggaattataggtgtgagccaccatgcccagccctccagtgctttttttttttttttttgagacggagtcttgctctgttgcccaggctagagtgcagtggcacgatctcggttcactgcaacctctgtctcccgggttcaagcaattctccttcctcagcctaccgagtagctgggactacaggcacacaccaccatgcccggctaatttttgtatttttagtagagaccaggtttcaccgtgtcggtcaggctggtctcgaactcctgacctccagtgatctgccctccttggcctctggggattacaggtgtgagccaccactcccggccctccagtgcattttaaaggctctgaaaagtcctacgttgtcctgaaaactcctcagtgatgctgaacctttttgacctgtgaaccccaggtttgggtaaagtctgctcacatccggcggcacacccataggaaacccccagcccggctgtgaggagtgtgaactttgattcaccaggtccttggcccagctttagtttctcccgtgtccgtgtttgcttgtgcaatcatgaatatatattgaccagcaccaggtgccacattgaacagtttgtccgcgccgtcagtgccatccggcatgcacggctgttgtacatcatgtctttgcactggactgagctcagctgcagaaagcagcacatttcagagggtgtctaccgggccaggagaaaacacacaaaccgccaacattttaaagcctgtaatcgacatcgtatacaattggaaaagatgttcatttatatgttttgtttttgttttcttaagacagggtctcagtctgtcacccaggctggaatgcagtggtgcgatcatagctcactgcagcctggagctcctgggctcagacgatccacccacctcagcccccagagtagctgggactgcaggcacaggccaccacgctgggctaatttttagatttttgtagagatggggtcttgctctgttgcccaggctggagtgcagtggtgtgatcttagctcactgcagactcaaactcctggattcaagccatccccacctcagcctcccaagtagctgcgactacaggatgtgccaccatgcccagctaatttatttttatttttatttttgctagagagagtgtctccttatgttgaccaggctggtcttgaactcctgacctcaagcaatcctcctgccaaggcaatcctctcaaaatgcagggattacaggtgtgagccactgtgcccagcctgttcatacgttttaaagagaggtgcagacaaaactgggttggtgcatccacatccctctctgtgtgatgctgggtaatttgcttaccctctctgggtatcctggagattgtcagccccagccaaggatggttaaaaggcattaaacaatacctaggacagagcctgacatctggagctcattaaaccatccgtacatgcagatgtcgttataattattatcaatgctattctgtcactccacaccctgactcccacctcagtggccccaggtgggggtgctctgaaatttctctggcctggctgagcgggaggggccggggttctgctggaataaagaacagaggaggaagccttgaaggatttgttctgtcccagctgtccccagtatcacagttagccacacggatggcagaagggacctttgacagtggacacaggggctggaagggcccagcctggggctcactgcaatctccgccttccagattcaaatgatcctcctacctcagccttccgagtagctgggattacaggtgtgtgccaccacacccggctaatttttgtatttttagtagagatggggtttcaccgtgttagccaggctggtcttgaactcccgacctcaggtgatctactcacctcagcctcctaaagtgctggaattacaggcatgagtcaccgtgcctggccttggggctttatctgactggctagagaatgggattcaaacaccaggaatcatcccaaaccgccaatgagaaggagccctggagtgaggggaaccgagacccctcctaaaaggatttacagggtgtcacagaatcaaaattacagcaaaggctcaactgtgagatgccagggtggctgatcattgattctagacccatcactaccagctggtgttctgtgagtttgaagccattgctgtctagctttgtgcctcagtttccccagctggcgattaccgtcccccatatggggacggtaatcacgtgtctgctgcagaggagttacaaagatttgtgaggcaatggaggcaacatttgcagccgaacctagtcaaaggaattactcactgcgcattaatttgttgttttttgagatggagtctcgctctgtctcccaggctggagtacaatggcgcgatcttggctcactgcagccatcccccgggttcaagcaattctcccgtctcagcctccggagcagctgggattacaggcacgcaccaccacgccaggctagtttttgtatttttagtagagacagggtttcgctatgttggccaggctggtctcaaactccaggcctcaggtgatcctcccacctcagcctcccaacctccctagcatttcaacgacctgaagtgaccctcttgatttattttctgacttgttcatttcctgtcacgttcccattagaacatcagtgcctcgagaggagggattcttgtctgtctctgttgccgctgtgtcccttgggcgtctggcatccgggtggctctctgcaatctgtttgctgagtgatcaaaggaaagaactaatggcaacatagtgcagctccaatgtacagatgaagaaatccaggctcagagatgtggaagtacttgcccagggccacacagccggaagcccgccaactcttttagtaaagggccagtgacactgtaaacattttaggcttttaggcaggtcacatgcagtctctgttgcctattttttcttttgtttacgaccctttaaaaatggaaaagacaggccgggcgcggtggctcacgattgtaatcccagcactttgggagtccgaggcggacggatcacgaggtcaagagttcgagaccagcctgaccaacatggcaaaaccctgtctctactaaaaatacaaaaattagctgggcgtggtggcacgtgcctgtagtcccagctactctggaggctgaggcaggagaatcacttgaacccgggaggtggaggttgcagtgagccgagatcacgtcaccgcactccagtctgggagacggggcgagactgcatctaaaataaaataaaataaaataaaataaaataaaataaaataaaataaaataaaataaggaaaagaccatacttagctgactgtgcaagaataggcaaccccttctagtttgctcatctaatgtcagaacccacgaactgattccaaaaccctccacagagaatctaaaatgctgcaaaccccgactctgtgatgctggggatctaaagtgcttagtttgtttttttgtttttttgttttttgtttttttgtttttgtgttttttgagacagaggctcgctctgtggcccaggctggagtgcaatggcatgatctcggctcactgtaacctctgcctcctgggttcaagcgattctcctgcctcaacctcccaagtagctgggattacaggtgcctgccgccacacccggctaatttttgtatttttggtagagacggggtttctccatgttggccaggctggtctggaaatgctgatctcatgtgatccaaccgcctcaggctcccaaagtgctaggattacaggtgtgagccaccgtgccctgccaagtgcttggttctttagtctggagtgcagtggtacgatctcggctcactgcagcctccacctgccaggttcaaacaattctcctgcctcagcctcctgagtagctaggactatgggtgcatgccagcacacccagctaattttttttttttggtacttttagtagagatggggtttcaccatattgtccaggctggtcccaaacccctgacctcaagtaatcctcctgcctcggcctcccagagtgctaggattacaggtgtgagctctactgcgcccggccaagtgcttggttctttctcgactcaatcctattttgttctacacaggtcaggtctgcctccactcccccaaccccatgccccatttcacccattggcctctgaagcccagagatgggcaggggtttgtctgagaccacacagcaagaggggcagcagaggaggatgggaacccagatctgcttccctcccaggctacacccctgtagccccccaacccctgcaaacttgttatttaagcctcctcattacaggggtttggagccgaggaagccctgctgccttttcgtaaatgctctccctagacagcaatctttgatggaggctctgggagaagttgttcagtgatgtgcatttgtcgagcacctactgtatacctggtgccagtatagggttgggtggaagggtcttgtccactcaacacccctttttctgccctattattgccttccctggccaggcgaggtgactgacacctgtaatcccagcactttggatggctgaggcaggaggagcgcttcagccctggagtttgagttcagcctggccaacatagtgagacctcatctctacaaaaaaatgtttgttaaaaattagccagatgtagggccacaagcctgtagccccggctacttgggaaaagaaggcaagagaatcacttgagcccaggaggtcgagcctgcagtgagctatgatgacaccactgtcctccatcccgggccacagagtgaggccctgtctcaaaaaaaaaaaaaaaatcaagaccatgattgcccccccataaagagcccttttaaacattttttccctaatcactctcctgtgaaattttaatagcataggtatattttatatacctatatatattaaaaatgtacctgtgccatcaaatatatataatatatattatacataggtatataaagtataactatatgtcatatagataggtatataaaatgtacctatatggcctgtaggtatataaaatatgccatataggtatataaaatatacttacgccattaaatatatatttaatatacaaatatatttgtttttttctatactgtaacaacatatgtctgtacattattattattattattattatttttgagacagagtttcactcttgttgcccaggctagaatgcaatggcgtgatctcggctcactgcaacctccgcctcccgggttcaagaagcaattttcctgcgtcagcctcctgagtagctgggattacaggcatgtgccaccgtgcccggctaattttgtatttttagtagagacggggtttctccatgttggtcaggctgctctcgaactcctgacctcaggtgatccaccgcctcggcctcccaaagcactgggattacaggcgtgagccaccgtgcccatcctacatttttttaaaaacacaaaattctggccagacatggtggctcacgcctgtaatcccagtgctttttttttttttttgagatggagtctcgctccgtcgcccaggctggagtgcagtggcgcgatctcggctcactgcaagctccgcctgccgggttcacgccattctcctgcctcagcctccggagcagctgggactacaggcgcccgccaccaggcccagctaattttttttgtatttttagtagagatggggtttcaccatgttagccaggatggtctcgatctcctgacctcgtgatccgcccgccttggcctcccaaagtgctgggattacaggcgtgtgccaccacgcctggcctaatcccagtgcttttggaggcctaggcaggagggtcacttgagcccaggagttagagaccggcctgggcaatatagtgagacccccatctcaaagcagaacaacagcagaacttctgagctagacagacaactttgctttgaatctgacaccagctttgggaaatacgctgtgcgcactgggccttggttgaccaaccttacaaattgagcagatttaatcagatggggtcaggaagtgctaattcagcacagtaaaaactcagcagatggaagctgcccactggggtctggggaatcttggggctgtggaagttagccagccttcgacattatgcactttgtacacatctgctcagaccgaaagaaggtccattttaaggctgggtgtgtactaagtaggtggaggaggaggaattatctgtgcctctttttcttttctttttttttttttttttttgagatggagtctcgctctgtcgcccaggctggagtgcagtggcgcaatctcggctcactgcaacctctgcctcccgggttcacgccattctcctgcctcagcctcccgagtagctgggactacaggcgcccgtcaccacgcccggctaatttttttttttttttgtatttttttttagtagagatggggtttcaccatgttagccaggatggtctcgatctcctgacctcatgatccgcccgcctcggcctgtcagagtgctgggattacaggcgtgatccaccgtgcccggccacctctggaagcagccagggccacacagtgcactagaatattcctcgctgatggcagaatattctgtgctgtccaacttggtcaccaccagccacgtgtggctctttggtgcttgaaatgtgatttgttcaactgagcaacttaaaatttaattttcttttctttttttttttttttttgagacatagtctcgctctgtcacccaagctggagtgcggtgactccatcataactcactgcaacctccacctcccaggcttaagcagtcctcccacctcagctccccgagtagctggaactacaggcatgccactacacccagctaacttttgtattttttgtagagacggggtctcgccatggtgcccagtctggtctggaactcctgggctcaagtgatcctcctgccttggctttccaaagtaccgagattacaggcatgtgccaccacgccccgcctaattttatttcagcgtagctaacttaaatgtaaaaagtcatatgtggctgtgacccttgtactgatggctgtagaacgtgaggagttttcaggagccaaatgatggaagaatggtcagcaggtggttgagaactattcccaggttttagagatgatttaaaatgagacggctggccgggcgtggtggctcacacctgtaatcccagcactttgggaggccgaggcaggaggatcacttgacgtcaggaattcaagaccggcctggctaacatggcaaaatcctgtctctactaaaaatgcaaaaattagccaggtgtggtggcaggagcctgtagtcccagctactcaggaggctgaggcagaagatttggttgaaaccaagagacggaagttgcagtgagccgagattgtgccactgcactccagcctgggcaacacggcaagattccatctaaataaataaatacataaatacataagatgaggcagccaaataaaaaggaaggagattctgaccaggctactcacatgggtgaaccttaaggacattaagctcaattgagaaaagccggacacagaaggacaaatactgcaagtccactcctaggaggtccctagagtcgtcagattcatagagacagaaagtaggttggcggggtcagggggtgtcggaggctggggaggggacggggagtgagtgtttcatggggacagagtttcagtttgggaagagtagaaagttctggagaggatggtggcgatggctgcatggccattggaatgtatttaatgtccctaaagctgtgcatggaaagttggttcaaatggtaaatattatgcatattttaccacaataagaaattaaattaaaaattaaaatgagatggcatagatttatagcatattatttttaaaactaaactaattttggccaggcatggtggtgctcacccatggttccaattactcgacagtctgaggtggggggattgctggagcccaggaggtccaggctgcagtgagccatgattgtgccactgcactgcagcctgggtgacagagcaagaccctgtctcaaaaacaaaattaggccgagcacagtggctcacacctgtaatcccagcactttgggaggctgaggcacgcggatcacttgaggtcagaagtttgagaccagcctggccaacttggtgaaaccccatctctactaaaaatacaaaaattagctgggctaattaaaattagattagaaaattagattacaggtggcacacacctgtaatctcagctacttaggaggctcaggcaggagaatcacttgaacccgggaggcagaggctgcagtgagctgagatcgcaccattgcactccagcctgggcgacacagcgatactctgttccaaaaaaaaaaaaaaatttaatttaattaaaaaacacataaattcctaggactataggaaaagaagaaaacttccttaacccaagaaagggaactacaaaaccccacagctaaccccgtacttagtggtgagaggctggatgttttctcccgagatcaggaacaagacaaggacaccactttccccatttctattgaacattgtactggaagttctgccagaccaataaggcaagaaaagaggctggacgtggtagctcacacctgtaatcccagcactttgagagaccaaagagagtggatcgcttgagcccaggagttccagaccagctagggcagcatcgcgaaaacccgtatctacaaataatacaaaaattagccagatgtggtggcgtgtacctggggccccagctacttgggaagctcagataggaggatggcttgagctcaggagttcaagactgcagtgagccgtgattgtgccaccttactccagcctaggtgacagagcaagatcctgtctcaaaaacgaagaagagaaagagatcagcctggctatcatggtgaaaccctatctctactaaaaatacaacaaaaattagctgggcgtgtgggcgtggtggcacgtgcctgtaatcccagctacttgggaggctgggaattgcttgagcccgggaggcggagattgcaatgagctggatcgtgccaccgcactccagtcctggcaacaagagaacaagagcgagattccatctcaaaaaaataaataaataaataaataaataaataaaagatacaaaataacaccatcaaagacagtaccaatagcgatattaatcaaatagcaatagtagtgaagctgccctctgcctggtgaagcactcactatggcagccatggttctgggagttttattaataattcattcatcacctttttttttttgagatggagtcactctgtcgcccagactagagtgcaattggcccgatctgggctcactgcaaaatccgcctcccgagttcaagagattctcctgcctcagcctcccaagtagctgggattacaggtgcccaccaccacgcccagctaatttttgtatttttagtggagacggggtttcaccatgtggggcagaatggtcttgaactcctgaccttaggtgatccacccacgttggcctcccatagtgctgggaatacaggcgtgagccaccgcgcccagccaatgtttcattcattaccatcttgtccctcataaacagcttccaagagggggtgctatagttgtgtccatttcacagatgagaagagtgaggcgcggatgcatccgaggccccgctccctggctgcccgattcgcaagctcatgctgggagccaccgtggggcctgacacttagtaggtgcccaagaaacattctcccttcccagggaaacacccggatgccagctgggcactgcggcctgctgagacgccagctgggcactgcagcctgctgagtctgtgtgggctctggttccggaagagggtcctgtgcccacggcctggcgcccggacggccggctgcccaggctgggtccttcccaacgtcatggccaccggtgcccagccttgagacagtccaaagggaactggccagctccgaggggccgctggcagccccagcctgggatcggctgcagggcttggggccgagctgggcacactcccctcggctgctgtccagcccagatggccacggccggggcagcctagctggaggaagggcttctctcgtctgctcctctgtttcctgacgaggaaactgaggcaccgggccctgctcctgtgctgttcatggcatccttggtcttggcaatcagtgggtgctggacacacggtgtgtgcatagccattagcacggcgccaggctaactccagaggctccgtgcgctaggaaatatcattgctttgatcattctcacagcaaccctgagaatggtctccatttatttttttaaaacaaggtcttgctctgtcactcaggctggagtgcagtggcatgatcacagctcactgcacccttgacctcccaggctcaagtgatcctcctgagtagctgggactacaggtgcctgctaccatgcctggctaatttttttttcttttttgttgagatggagttttgctcttgttgcccaggctggagtgcaataatggcgcgatcttggctcaccgcaacctccgcctccggggttcgagcgattctcctgcctcagcctcccgagtagctgggattacaggcatgcaccaccatgcccggctaattttgtatttttggtagagatggggtttcaccatgttgatcaggctggtctcaaactcctgagctcaaagtgatctgcccgcctcggcctcccaaagtgctgggattacaggagtgagccactgcacctggactgtttttttgtattttttgtaaaaacggggtctcactatgttgccctggctggtctcgaactcctggcctcaagcgatcctcccgcttcggcctcccaaagtgctgagattacaggcgtgagccactgtgccactgcccctggcttaatcatcatctcattttgcggatgaagaaactcaggccttgaaaggaaagtgaggccgggcgcggtggctcacgcctgtaatcccagcactttgggaggccgaggcgggcggatcaccaggtcaggagatcgagaccatcctggctaacacggtgaaaccccgtctctattaaaaattcaaaaaattagccgggcgtggtggcgggtgcctgtagtcccagctactcaggagactgaggcaggagaatggcgtgaacccaggagacggagcttgcagtgagccgagatcatgccactgcactccagcctgggcgacagagcgagactctgtctcaaaaaaaaaaggaaagtgaccttctcaggagcacaaagacccggggggtcttggagacagtacttggctcaggtgtctgatcccagcacaaaactgtagataaaataaccctggtgaaaaagcccatcacagggcctgggagggagaacattgctcgtggttctgacccgcagctttccttgtttatgaaatggatacagccaggcatggtggctcacgcttggcatcccagcactttgggaggccgaggcgggcggatcacctgaggtcaggagttcgagaccagcctgaccaacatggtgaaactcccgtctctactaaaaatacaaaaattagccaggcgtgatgacgcgcgcctgtaatctcagctactctggaggctgaagcgggagaatcacttgaacccgagaggtggaggttacagcaagccgcgatcgcaccactgcattccagcctgggagacagagtgagaccctgtctcaaaaaaataaaaataaataaataaaatagaagaaagtaataatggggcggactctcgtgattgaggtctccaaatgccctcaagtgcttcaggagtatcctctcctcactgcctcccagctctgctaaggcctgggcagtgtttgtgcccacgtggaagatgagaaacaggctcaggacagttaggcgacttgcctgaggtcacacagcgatcgcgtcctggccttggggtctggcgggtgggcaggaggggcgtgattctcttcctgcggctttcgacgttggttgctgccaccttcgtctttgacctgggtgatccatgggtggggctggggaggggcgtctgcctggctgggcttgtccacctgccccccaacttcagccctccgtggaggggtcagggctccagagggggcggatgtgactcgtcctgcatccaggctgccagagccgataacgctgagctcagcgtctgtctgcctgcgcgtctgccaaggaacctaattatttttagataagatggaggggcgggcgccggggcagagggagcacccaagctgggcgggcagtggggtcgtcgccatcagagagaccacccctcagcctcctctctctggggtccctgaacggcaacccaggactaacagccgggtccctgggactacaggggcagaggctgaggctaagggacgtgacgtctccaggactcacctctctggtcctcagtttccccatctgtaaaacggacatagtgatagacctcctgcatagggctaaggcggggctgaatgactgaacctcattttattttatttattttgttttatttattttattttatttattttgagacggagccttgctcttgtcgcccagactggagtgcagaggcatgatctccacttgctgcaacctctgcctcccgggttcaagcgattctcctgactcagcctcctgagtagctgggattccaggagcgtgccaccatgcccggctaatttttatatttttagtagagacggggttttgccatgttagccaggctggtcttcaactcctgacctcaagtgattttcctgccttggcctcccaaagtgctgggattacaggtgtgagccaccgtgcctggccgttttgttttatttttttgttgttgcttaatttcattttctgagatggggacttgctatgttgctcaggctggcctccaactccagtcgcccagactggactgcagtggtgcaatcctggctcactgcaacctccgcctccgaggctaaagcgattctcctgtctcagtctcccaagtagctgggattacaggtacgcatcaccacacctggctagtttttgtacttttagtagagatggggtttcaccatgttggccagtctggtctcaaactcctgaccctgacctcaggtgatctgcctcccttggcctcccaaagtgctaggattacaggcgtgagccaccgtgcccggcctgaacttcattttacagatgaggctcagagaaggcaagcgacttgctcagggtcgcacagcaagaaagcggcacagctgggatttgaacatcagtctgttaagattccaggtgtctaagttcttacccacgactgagccgcccctgcagaagcggagggcttacccaacatacgggtacactggcgctcacagggcctagctggtgtctgcagggtgcctggccagatgtctgtgaccctctagggcagcagccaagggaagggcccaaagagagaccccagggcctgggtgtgttttggggccactgtttgtctccatagcactggcccagcccaggactggggccaccagcatcgacacttcatctgctcctggggtggggtctctgtgatgccaccagtgtttcttccctctctttgcagatgcagagcaaagcggcagtccccggacagggatgggctctgaccaggaggacagcaagcccatcacgctgggtgagtctgggggcagcgtggcggtgaagggcggagggcgcagccctgtcctcgtcttttatttgggaatcatttgcttggcaccactcgttttacagatgagcagactgaggctcggagaggttaaggggcctgtccaggggctaccagggagctgggttggaacccacgactctgagctcccagcttctgggctctgaggtgctcaccccatgggagaccccagagggttctacggtcccatgggacgtttgagggtttttgtttgttttgttttgttttcattcatttatttattttgagatggagtctcgctctgtcatccaggctggagtgcagtggcacaatctcagctcactgcaagctccgcttcccgggttcaagtgattctcctgcctcagtctcccaagtagctgggattacaggtacctgccaccacacccggctaatttttgtatttttagtagagacggggtttcaccatgttggccaggtcggtcttgaactcctgacctcaggtgatccgcctacctcggcctcccaaagtgctgggattacaggcatgagccaccgtgcccggcctgtttgtttgtcttagaaacggtctcacgctgctgcccaggctggagtgcagtgacaccatcctagctcactgcagcctggaccagctaggctcaagcgatcctcctgccttagcctctcaagtagctgggactacaggtgtgcaccaccatgcctggcttttttttttttttttttttttttttttttttttgagatggagtatcactctgtcgcccaggctagagtgcagtggcgcgatctcggctcactgcatcctccatctcctgggttcaagcaactctcctgcctcagcctcctgagtagctgggattacaggtgtgtgccaccacggctggctaatttttgtatttttagtagagatggggtttcaccatgttggccaggctggtctcaaactcctgacctcgtgatccacccacctcggcctcccgaagtactgggattacaggcatgagccaccgcgcctggcttttttttttaattttttaaatatttttgtagagacagagtctcactatgttgctcagactggtctcaaactcctgagctcaagtgatcctcctgtcttggcttcccaaagcgctgggatcataggtgtgagccaccacacccagccctcatggggcgtctaatagatgggtaggacagtgtaattctatgttgtagggataggaagtgggaaaattaacctcacttagaccagagcagtcacttccatcctagcccccagctcctgcccttggcccccaccatttgtccttctcactatggccagaggacacctgtgagcccccaagtcagggcccgtccctcctctgcgcacagccatccacggctcccacctctcttggggtaaaagcccaggtcctccctgtggcccacaaggccctgcacaacctgtcccatccctgccctgtcctcccctcctccctctctccccgtcgtccactcccagccacacagacctcctcgccgttcctccagtgcaccagacccagtcctgcctcagggccgctgcacattctgttacctctgtctaaacagccaactaactgctcgcttgttctctccagatctcccctggtctcagctcaaatgcccccttctcagagaggtctaccctaaaccccttcagcataagcagcctctggctaccctcaatctttttttttttttttttttgagacagagtcaggctctgtcgcccaggctagagtgcaatggcgcaatctcggctcactgccatccccgcctcctaggttcacgccattctcctgcctcagcctcccgagtagctgggactacaggcgcccaccaccacacccgggtaattttttgtacttttagtagagatggggtttcaccgtggtagccaggatggtctcgatctcctgaccctgtgatgcacccgcctcggcctcccaaagtgctgggattacaggcatgagccaccgcgcccagcctggctaccctcagtctcagccctctgttttctttccttcagaggaagttagtgattgcctatggatttgcttagttgtttagtgactgcacgggtgtctgctcatctccccagtggaatgtcacctcctccagggcagaggctttgtctgtctacatctctgttgtgccctcagggcttagaatggggcctgatgcagagtgggtgctcaataaatacttgtagaaagaaaagaaggagagagggagggatgaagcagagagaagaagacaagagaggatatatggggagaggaaggaggagagatgaaaaagaaggaaggggccaagtgcggtggctcacgcctgtaatcccagcactttgggaggccaaggcaggtggatcacctgaggtcaggagttcgagaccagcctgaccaacatggtgaaaccgtctctactaaaaatacaaaaattagtcgggcatgttggcacacacctataatcccagctagtcgggaggctgaggcaggagaatcgcttgaacccaggaggcagaggttgtggtgagccgagattgtgcaccctgggcgacacagcgagactctgtcaaaaaaaaaaaaaaaaaagaagaagaagaaagaaggaaagaaagaaagaaaagaaagagagagagaaaaagaagggccgggtgcgggggcttacgcctgtaatcccagcactttgggggactgaggtgggtggatcacctgaggtcaggagtttgagactagcctgatcaacatggagaaaccctgtctctactgaatatacaaaaattagccaggcgtggaggcacatgcctgtaatcccagctacccgagaggctgaggcaggagaattgcttgaacccgggagacagaggttgcagtgagctgagatcgcgccattgcactctagcctgggcaacaagagtaaaaactccgtctcaaaaaaaaaaaaaagaaaagaaaagaaaaagaaggaaggggccagggcgcagtggcttacacctgtaatcccagtactttgggaggccgagtcaggtggatgacctgaggtcaggagttcaagaccagcctggccaacatggcgaaaccccatctgtactaggaggacacgggaggctgacgcaggagaattgcttgaacccaggaggaggcggaggttgcagtgagccgagatcacgccactgcactccagcctgggggatagagtgagactgtctcaaaaaaaaaaaaggaaaggaaaagaaggaaggaagagaaagcgagtgggtgaggcgtccttcttggaaggaccggaacaggcatgcacagggaggctggaaggttctcggaggttcacaggcctgaggccactcctcactggcccccggtgactcctccgtctgtgacccgggtcctccgcggcctcctgtgatccccagacgcctctctccaagccagatgttggagggaggtgggggcagcggcgcttggcctggtcccctggggagcttgggcgtctggtagaggaaatcacgtcctcccagctcgccagggagtcccccagagatggagctgagcaggcgctgcacaaacaggaaaccccggtcgggggaggcggagggggcgtgctgacaccagctggccagctgggtcagcaggaaacggctctggccacttctcctggacactcgggggccaccgctctgtcctcttcagaatgcgtggccctgaacctcccagcgcggggcagggttggttcattgccttcactcagcaaatgactgtaacagggggccgggtgcggtggctcacgcctgcaatcccagcactttgggaggctgaagcgggaggatcgcttgagcccaggagttcaagaccagcctgggtaatatagcaagaccctatctctacccaaaaaaaaaatatacacacacacacacacacacacacacacacacacacactagccccaggagttcaagaccagcctgggtaatatagcaagaccctatctctaccccaaaaaaaaaaaaaaaaatatatacacacacacacacacacacacacacacacacacacacacactagccaaacacggaggtgcatgcctgtaatcccagctacttgggaggctgaggtgggaggatcgcctgagcccaggagtttgagaccagcctgggtaacatagcaagaccctatctctacaaaaagtaataataataatacaaaaattagccaagggtggtgatgcgtgcctgtagtcccagctacttgggaggctgaggcaggagcatcacttcagcccaggagttcgaggctgcagtgagctatgattgcaccgctgcactcgagcctgggcaacagagcaaaattctgtctctaaaaaagaaagattgtaacagggggactggcgggggtttgggtctgcagaactggacacagccctgagctccctgcagtccgtgctgccccctgggggccgggagaggaactgctcccaccgccacccaaaagccaagagcctgtcccacctccaaacctaccaggctccctggctctttccactccaaccctgctggcctgcaacttgccaagtgcatttctacccggaggcctttgcacgggctgttcccagtgccgggaacatcgtggccctcagggaggtgatgaaacatcatccccatcggagaagccaacagtcacggggcggttgccaggcgctgttctcggagctttgcagattttaacaagttccttcctcttatccagtctcatcttgaggtctgtaaaatgccaccatctcggtcaggctttctctgagccctgggtgtaaaatagcctccctccccaccctagctagttccccaccagccgcctgccttaccacaggctgatgcacctcgcatttgacttaatgagcttttaatttgtagtaaaatgtgcatgatgtacaatgcatcattttagccatttttaagtgtccaagtcaaagtgcactaagtacattcacctctatctaattccagaacctttctttttttttttttttacccccaggctggagtgcagtggcgcaatctcggctcactgcaacctccaccttcctggttcaagcaattctcatggctcagcctcccaagtagctgggatcataggcacatgccaccacacccggctaattttttgtattttcagtagagatggagtttcaccatgttggccaggctggtctcgaactcttgaccttaagtgattctcttgcctcagccttccaaagtgctgggattacagatgtgagccgccgagcctggcctaattccagaacatttcatcccccctaaaagaaaccccatccccatcagccaccactccctgtctcctctcccagccctggtgcccacgcatccccttcttgtctctgtggcttggcctgtcctggacatttcagtgaaatggctcatgcctgtaatcccagcactttgggaggccaaggtgggtggatcatgtggtcaggagttcgagaccagccggaccaagatggtgaaaccccgtctctattaaaaatccaaaatttagacaggcactgtggcaggtacttgtaatcccagctacttgggaggctgagacaggagaatcgcttgaacctgggaggcataggttgcagtgagccaagattgcgccactgcactccagcctgggcgacagagtgagactccgtctcaaaaaaaaaaaaaaagaaaagaaaaagaaagaaagaaatggcatcacacactgtgtggccttttgtctctggtgtccctcactgaatgatgtcctcaaggtgcatccatgttgtagcctgtgtcagagcctcgttcttttatttttatttatttactggttttgagatgaagtctcactctgatgcccaggctggagtgcaatgtcgcgatctcggcctgtagctgggactacaggtgcccgccaccatgcccggctaatttttgtatttttagtagagatggggtttcaccatgttggccaggctggtcttgaacccctgagctcaggtgatccacctgcctcagcctcccaaagtgctgggattacaggtgtgagctaccactactgcgcccagcccaaggcctcattctttttcttttccttcttcttttttttttttttttttttttttttgagacagggtcttgctctgtccccgaggctggagtgcagtggtgcaatcatagctcactgcagcctcaacctccagggctcgagctatcctcccgcctcggcctcccaagtagctgggactacaggtgtgcaccaccacgcccagctaatttttgtactttttgtagggatggggtttcgccatgttgcccagtcccgtctcaaactctggggctcaagtgatccacctgcctcagcttcccaaagtgctgggactataggcacaagccaccatacccagctaattttcgtattttttgtagacacagggtttcgccatgttgcccgggctgatctcaaactcctgagctcacgagatccacccacctcagcttcccaaagtgccgggattacaggcatgagccaccacgcccggcatccttttcacggctgagtcctattccagtgtgtggctagaccacgctgtgtttatctcttcatcttttgaagggacatttgggtggctttccagtttgagctgtggtgaacagtgctgctaggaacattcgtggacttttgctgacctattaatcttggctgctgtctgtcgctcacactggactttgagtctcacaggggcaactgcttcagcctgtatcatctcctgctgtgccggggcccagctcagaatcagacactgtggatgcttagtaaacgcctgttgagtccatgaatccctcctacaagggcgtccgagggcaggacagggctgtccccaagctgtctgaggttggccaaggctcccgacctctcggggacaacttcgatttccaaatctgtgaaatgggtccaaaccactccagtcgagaggacagtctcccttcctttaatattaggtaggagcaatgctggggacactgagggttttaactgcggcttgtgggcctcccattcaaccccccattttaactgacccattgctgggtgccaagctctggtctaggcacgaaggacactgcagggtcggggcagacagacatccctgcccacacggacctcccagtctgaaggggagaagaacaagaagccagagtatctcgaagggtgacagtgtgtaaagcaagccagctgcccctcccaggcagttggatacagatctcacgacaaccccgatgatgggattgatggtttcacttttgcaattagggaaacttggaggctgagagagggaaagtgacctgccccagatcacacaccgaggcaggtgatggagccgatgtgagcccaggcctccgctttccgctcttttttttttttttttttgagatggagtcttgctctgttgcccaggctggatggagtgcagtggcgcaatctcggctcactgcaagctccacctctcgggttcacaccattctcctgcctcagcctcccaggtagctgggactacaggcgcctgccaccacgcccggctaatttttgtatttttaggagacagggtttcactgtgttagccaggatggtctccatctcctgacctgtgatcctcccgcctcggcctcccaaagtgctgggattacagacgtgagccaccgcacccggctccactcgttttttaagagagggtgtcgccctgtttcccaggctggagtgcagtggcacaacaatggttcattgcggcctccacctcccaggctcaagtgatcctccagcctcagcctcctgagtagctgggactacaggcacggaccacaacacctggctaattttaacactttttgtagagatggggtctcgctgtgttccccaggctggtcttgaagtcctgagctcaagcgttcctcctgcctcggcctcccacagtgctgggattacaggcatgagccactgcgcccggcctgctgttcacttgaatgcagcattccacagcatgggggaacccggatgaaggctgtgtgaaggcccacactggacaaggaccccccacggggccttccccatcagactggagctgtcattcccccacagcacaggatggacagggggaacgtccaggctcgggccagcccccaggagtccaggcagccctggagtgtggggaagggaaacaggcccagctcagcctactgaccccgctgtcttcctgttccagacacgaccgacttccaggagagctttgtcacctccggcgtgttcagcgtcactgagctcatccaagtgtcccggagtgagtgttcccgtcagccctgagctgggtcttggagaggggagggggccgcagggaggaaggagcccacccccctcaccctactccttgtcctttccagacaaccccctgtgtcactaagccaaggttcctagaaagggaggtggccaggcccttcccagagcccaaggtcagggctccctcccacctctccaggaaacagaatctaaatgctggatggcaactaaggaaacttctgccccagcatccctcctcctccctggggcctccactgtcctgtcccaggagaccccaaaggaccccgcccctcctgtccccttgctttctctgctgacctgctggggacccagcacattccgtcacacactgtctgaatcccaccccagcgagtcctgggcgctgtccttctttagccctgactgacaccttccctgtccagatcagcagagcctggcctccagctttggctacacctctgcctcacagtgtgctcttggcctctccccatggccttggtcctctgatccatagaataaaactggtttcagccaccctaggaaccgggccaatatgggaagggggtccccctttggactgcacccagtggctttccctacctctctaaagcaaaccgcagcactgggcactgcttcctgcctcactctcctctgtcaccctctgcagcacccgtggtgactggaacaggacccaacttctccctgggggagctgcaggggcacctggcatacgacctgaacccagccagcactggcctcagaagaacgctgcccagcacctcctccagtgggtaagtacccaggtccccacctctgggcatttcatgaccccattcatcaacccatcccctctggcccgagctgactcattcctctccctggaatacctcttttcacgattcacctggcctgagaaactcctactcatctcatccttcaaaacccagccagccccacgtgcctcttcccctagccctgacagcccaccgtgggctcccccagcctcaagtcctgccggctcagccagcccttaggaccctccccacccagaagaatgcagacacaggttgttgctgagatatgctttgtgacctcgagcaggtcacactgtgtgtgccccagtttccccatccataaaatgggatcatacccctaacaggcagttctgaggactacaggtggccaggagattagccaggctgcctgggttttggtctccaccatgctagcttggtgtccgacctgtgttgagaccctccctgcctctggcccgggtgtcccatccaagcaatggacaggttggaacaggcgttcgtagggaacgggctgaacgcccgcggctcccgcgatgtctcgcgatactacctccctcgcccccgctcacttaaggaccggaagtagcaaagcccgccgtcgcgccccccgccccgcgtctccctggtaaccagcctctccccttccctcgcccataaggagcaagcggcacaaatcgggctcgatggaggaagacgtggacacgagccctggcggcgattactacacttcgcccagctcgcccacgagtagcagccgcaactggacggaggacatggaaggaggtagggctggtggcgggggcggagccggccttccggtctgagtcaccgtggcgggaactacgtcttccggcagccactgcgcgggcgccgcggggcaggaagccggcctggagccgcggggcctcctgggaattgtagtcgtcccgagctgcgcttggctggaagtacggtccgggttcgcgttctcggatctctttggttccgctgcggcgaaggagggcagagactgtcccctgcctgactctcctgccctccggccgtgaatgccacatctctgtggggtccccgagctgcaggatggactcagtagtgactctgatcaacagggcgcctcttcctgggatctgtcatagaatccctcgtctgtagggaccctgtttgtcctcttcccctctagaaggtcctgagatgccggatcccttctcattggggtccttcttgaggttacttttttttttaaccaggttcccatctccatgggatcttctggttctgcaggagactcgtctcctttctgtagggtctccattcccatggcgtcgttttctaggaagattttatcctcttgcttttctgtcttcagaagggtcctctctggggtgtctttctttctttctttctttctttcttttttttgagatggagtttcgctcttgttgcccaggctggagtgcaatggcgcgatctccgctcactgcagcctccacctccctggttcaagcaattgtcctacctcagcctcccaagtaactgggattacaggcatgcaccaccatgcccggctaattttttctatttttagtacagacggggtttcaccatgttggtcaggctggtctcaaactcccgacctcaggtgattcgcccgcctcggcctcccaaagttctgggattacaggcgtgagccaccacgcccggcctctgtttttgtttgtttgtttgtttgtttgtttttgaaacggagtctcggtctgctgcccaggctggagtgccggggtgcaatcttggctcactgcagcctcgacctcccaggttcaagtgatcctcctgcctcagcctcccaagtatcggactgcaggtgcatactgccatgcgccgttaattttttttttttttttttttttttttttggtagagatggggtctcactatgttgcctaagctggtcttgaactcctgagttcaagtgtgatctttcctcctgcctcgtcctcccaaagtgctgggattccaggtgtgagccaccatgccgggcccctcttatttttttttaatttttgttttttgagatggagtcttgctctgtcacccaggctggagtgcagtggcgagatcttggctcactgcaacccttcctcctgagttcaagcaattctcctgcctcagcctcccaagtagctgggattacaggcacccaccaccacacccggctaatctttatatttttagtagagacagtgtttcaccatgttggccagtctggtctcaaactcctgacctcaggtgatccacccacctcggcctcccaaagtgctgggatgacaggtgtgagccactgctcccggccacctgtaggatttttagaagcagtataacattaggattaagaggtcagattcaggcattggagagacctgggttcagatcccagccctgcccgtgtctagctctgtgtgctgtgtaacctggggcacatcacttaacttctctaagcctcagtttcttcatctccacaatgggggtgatgtgaataatgttctttgggagctacaggaggaggaagggtaggatgtgcgtgaagcaaccgtctggcccatgcgacatacccgggaaacgggaggtcactgtcatccacgtctttataacattcctgtctctgaccaggctcggtggctcacgcctgtaatcccagcactttgggaggccgaggcaggcggatcacgaggtcaggagatcgagaccatcccggctaacacagtgaaaccccgtctctactaaaaatacaaaaaaaatagccgggcgtggcggcgggtgcctgtagtcccagctactcaggaggctgaggcaggagaatggcatgaacccgggaggcggagcttgcagtgagctgagatggcgccactgcactccagcctgggtgacagagcgagactccgtctcaaaaaaaaaaaaaaattcctgtctctttccggcactcggacgcatctagttgtgacatttcaggtgccaaggcccctcccttccacagtgtgggctcccagagcaggaacattcctaaagggtctccatccctcaggggacctgtctcagtatttatgaggttctttttttgtttgtttgttgtttttgttttgagatggagtcttgcttgttttgagagatcacgccagtgcacgccagcctgggcaacagaacgagactatgtctcaaaaaaaaaaaaagaaaaaaaaagtcacttctgtttcgttttttttgttttttgttttttgttttttttttgagacggagtttcgctcttatcacccaggctggagtgcagtggtgcaatctcggctccacctcctgggttcaagtgattctcctgcctcagcctcccgagtagctgggactacaggcgggcaccaccacaaccagctaatttttgtatttttagtagagacggtttttactatgttggccaggctggtcttgaactcctgacctcaagtgatccgccaacctcaagtgatccgcccatctcagcctcccaaagtgctggcattacaggtgtgagccaccgcacccagccgtgacttctcattaactctgtaattgatgaggctgtcagaatgtaaactgcacgctaattaaagtgaaagaccacctttgcgatgagccaaagcaaccctgagaggaaaaattgtagctttaagtctatttattaggagaggagaaaggtggaaaataaagaatctagctttcaacagagaaaactcaaaaagaaaacattttaagctctggagctcagtctgacttttctgcccggctgctcactggcaaccccttccactggggaaggaggtggtagcaatggggggaggacaaagaggaagcccccaccagcttctgctctgtgattgggaatcgcagagctagcagggaatgtcagaggaggtctgtgctcctgcagcttccacttgattacctcaggggatggcaaactcactccctcctgagggtttcttttttttttttttttttttctttttgagacagagtctcgctctgtcgcccaggctggagtgcagtggcgccatctcagctcactgcaagctccgcttcccgggttcacgccattctcctgcctcagcctcccgagtagctgggactacaggcacccactaccacgcccggctaattttttctattttcagtagagacggggtttcaccgtgttagccaggatggtctcgatctcctgacctcgtgatccgcccatctcggcctcccaaagtgctgggattacaggcgtgagccaccgcacccggcctcctcctgagggtttcatcctcagtgtaaagccctcctgtgtgctggccctacctgaggccctggggacacagagatgatccaacccactcttgtccctaccttccaggggctaacagcctagtgagggagatgggtttttatccaggtgactacagcccagaggaggaggcacagaagacagtcagggggaacaagaggaccctgatagaacttggaagaaaagggaggacctccccgaggaggagaatcaggctgacagagcagtgaggagctcgggcaactggcttctctgcttctccagctgtgtgacatttggcaggttccttaacctctctgcccctcaatttcctctgctatacgatcaggttgctggccgggtgcagtggcttacaactgtaatcctagcaatatggcaagaccccatctctacttaaaaaaaaaaaaaaaatagcatcacatagtggtgtacacctgtagtcccagctccttgggaggctgaggtgagaggattgcttaagacgggaggtcaaagctgccctgagctatgatcataccactgcactccatccggggcaacagagaaagaccctgtctcaaaaaaaaaaaaaaaaaaaaaaaaaaaaaaaaaaaaaaaaaaggctcacctgtaatcccagcactttgggaggccgaggcaggcggatcacctgaggtcaggagttcgagaccagcctggccaacagggtgaaaccccatcattactaaaaacacaaaattagccgggtgtggtggtgggcacctgtaatcccagctactcgggaggctgaggcaggagaatcacttgaacctgggaggcggagggtgcagtgagccgagattgtgccattacactccagcctgggcaacaagagcgaaactccatctcaaaaaactctgccttgatatcccagtgaagagaaaacactggaagaatttttttttttttttttttgtcagagtcttgctctgtcgcccaggctggagtgcagtggtgtgatctcggctcactgcaagctccgcctcccgggttcatgccattctcctgcctcagcctcccgaatagctgggactacaggcacccaccaccatgcccggctaattttttgtatttttagtagagacggggtttcaccgtgttagccaggatggtctcgatctcctgacttcgtgatctgcccgcctcggcctcccaaagtgctgggattacaggcgtgagccaccgcgcccggccaaacactggaagaattttaacacccgtggcccagggctggactttacgtaaagcacgcacctggggcgtgagagccgggtttattattaattcgcggctaagctacaaccgggatgatttaagtggatttatccgcagggaagatgatgggagggcattcccagcagggagaatcgtggtttgaggagttgcactgtggatgtttggggccagaccatcctctggggcggggctgtcttgggcactgttgggtgctgtgcagagttcatggcctccacccactccgtgtcaggagcaccccccagtggtgacaaccgtaaatgtccccagacctggccaaatgtctcttgcgggcagaatctcccctataatatagccagaggcatatgcaaagcacctaaacggagtggggagaaggtgcgtgacccctggtctgggccactcttttttttttttttgagacggaatctctctctgtcgctcgcccaggctggggtgcaatgcgcgatcttgactcactgcaagctctgcctcccaggttcaagcgattctcgtgcctcagcctcccgaatagctaggattacaggtgcccgccaccacggctggctaatttttgtatttttagcggaggcgggttttcaccatgttggccagtctggtctggaactcctgacctcaggagttccaccacacccggctaattttgtgtttttagtaatgatggggtttcaccctgttggccaggctgctctcgaactcctgacctcaggtgatccgcccgcctcggcctcccaaagtgctgggattacaggcgtgagccactgcgcctggccttttttgttttgttttgttttgtttttcccaaatagtgacttgctctgtcgcccaggatggagtgcagtggtgcgatcagcgcccactgggctcatgccatcctccttcctcagcctcccaagtagctgggactatgggcacttgccaacacacctggctattttttgtactttttgtagagacagagttccctgtgttgcccaggctggtcttaaactcctgggctcatcctcctgcctctgcttcccacagtgttgggatggcaggtgtgagccaccacacccggctggccgctttttctctatgtcccttcccaacattttagtcccagacagccctgcggaggtgcctggcaggcacctcattttgcagagggaaaccctgaggctcaaagaggtgacatcacctgctccaggtcaccccagcggcaagcgggtgcacagggacacggaaccacgtggccgttcccagcggccccactcagggtacctcgctctctttgttttatggggcatctgtgatgtcctaagccgggttatttcccctcccggcaacactctgtgagatcagggctgcccctggccatcagttgacaagtggggaaactgaggcccaaaggtcccacagcaaagaaggggcagagccccgagcttatgcccagtgcttcctgggcctctccccatcgctgtggcctgcatcggtaaacatttcgcagcctctgaagtcccaagggggacgcctcagaacaggcctggcccctgggctggagcagggttcctgaggttcccagtggggcccagctgtaacctcattggtggaccgaggcaagggccagaggggcccaagggaagggccagaggggccgggggcacaggaagggccggaggggctgggggcacggggagggccaggcttattgttgcagcctgcaaggctgtcccaagccgggtgcctccgcagagggaggacacaaaacaggaacccaggcaggcagggtctctcccgaaggtgcccttggcccctggccaccaccctgggatgctcctcctcctcctcggcatcctccccccacccttccctgccctttccagcttcctgtctagacagcccccaattagccactcattaagggggttaagctgattagagcagctctcccttcctctggcggactcggggccttttctcccgggcagtgctcagccagtccccaaccctgaggctcacagaggcctggggggatcatgccagcccgatgccaggcaagacccccaccccacacctccaggccccacattccagcctctaggctttgcccgcttggggcctgggccaggccctttctcctggccgcctccacccgaggcctccctgcttacgcggctgcgtggggtggagggaaggtgccttggagcagcccccactgtgctttgtttttgctgcttgtgtagctcccccttgaaggcgacaaaggtcccgtccacaggcggttattacacagggcggggcaggcagcccccatccattcctctcctctgtcaccccaggcttcccatcccttttttttttttttttttgagtcagaatctcactctgttgcccaggctggagtgcagtggcatgatctcggctcactgcagcctctgccttccagattcaagcaattcttctgcttcagcctcgcaaatagctgggactgggactacaggcgcctgccaccatgaccagctaatttgtgtatttttagtagagatggagtttcaccatgttggccaggctggtctcaaactcctgacctcaagtgatccgcccgcctcggcctcccacagtgctaggatgacaggtgtgagccaccgagcccagcccgcccatccctttttttaaccccagggtggaggctagtgcaacgtggcctggggagggacagagttgggttccaactccacctccacccccccttggctctatggccttaggcgagtgacgtcccccatcaggcctcagcctccacatctgtgaaatgggcgcagctcctgtaagctctgcacggggcagctgtgaggaccacattaagagaggaggctagtgccttcacagaaggtcctcacccagggcgatgctgccccacccccagggacactggccggtgtctagggacatctgtggttgtcacaactgggagagctcttgacatggagtgggtcgaggccagggatgctgcttagcaccctgcagtgcccaggacagcccctccccagggaacgagccagccccaatgtctacagtgctgaggctgagaaacctgtattaattatgtagaaaaaaattgaggctgagtgtggtggctcacacctgtaatcccagcactttgggaggccaaggctggaggatcgcttgagcctagtagtttgataacatagggaaaccctgtctctacaaaaaaataccaaattagctgcatgtggtggcgtgtgcctgtagtcccagctactcgagaggctgaggttgggaggatcgcttgagcccaggaggtcaaggctgcagtaagctatgattgcaccagtgcactccagtctgggcaacagcgtgagaccctatctcaaaaaaaaaaaaagaaaaagaaaaaagtctgccccctgctcacaacggaataaactcctagtgtggcagacggtgtgtaaaccagggggacccccagctcctgggactcacctcctctctccctccccactcaaggtgtggatttcaatgtgtgcagcctcctgggacctctgcagggcagaggatcatgggacgcagaggatcatgggacgcagagtctcttgggggtccatggaatcctctaagacagaggattttacctatgggtgatcctgaccccagaggacactgggtgacatctggggacctgtgtggttgtcacgactgcagggtggtcctggcatggattgggtccagggacaccgcttagcaccctgcagtgctcaggatggccccaccctagagaatgatccggtcccaaatgtccacagggcccagaggagaccttggtgcactgtcaacgccccgtggtcactgctgtcctcatcagattcatgccctgcatcggggcctctgtccactccacacactctgtgtagggcccctcctgaccccggaccctagagacccagccagagtgggccttggccccctgggggagccggcatttcagtgggagatgggcttgtttgttgagcaaacaaatggctgctccgacggggtgatgagggccttttgtcaaatacaaagaggaggtcagatgggcgtgtgtgacaaatggctgctccgacggggtgatgagggccttttgtcaaatagaggaggtcagatgggcgtgtgtgacaaatggctgctccgtcggggtgatgagggccttttgtcaaatacagagaggaggtcagatgggcgtgtgtgttaaacagacaggaagaagctctgatgggggagccctcgggcctgcgtcctcctcacagtcaatattctcagatggggcattcaggatgccgggaggggcgtatggatgtgttccctgagaggaaagatggccactgagatgggcgggggacgcacatgcccgctggctgaacagggaggtcccacaggggtcccaggcatgcctgctgaacagacagaggatgcttggaggcggggtgcagagtcagtgtccgtagagcctgccgggagcgtgccggcttattctttctcgcggtgcctgagctgcgctcccccctccttcctgccctgccctggctgccgctggccccatctcaggaagctctagcggtgcctgcagggatgtggcggccgggggtggagtctgagccagactatttccatccaggacaagcggttctaggaaatcctcctaaatgagcgtctgacaaccctaacctcgttcccgccgtggccctgcgcttgcagggagctgccagcccctgcacacacacacacacgcttgcacacacgcatgcatgctcatacatatatgcacgcacgtgcacaggcgtgcacacatgtatgcatgcatgcttgcagacctgtacgtgtgcgtgcaagcacacatacatagacatgaacatgcatgtgcaggcatacacatacatgcatatattcacgtgcacacgcatgtgcgcattcacacacatagacacgtgcacaggcatacacatacacagatatgaacgtgcatgtacaggcatacatatgcaggcgtgcacacgtccacatatgctcacatgcgtacacacacatgcacagacatgcacacatgcatgcagctgtgcacatgcgtgcaggcatacacacatacatgcacgcacacacatgcatgtattcacatgcacacacacacgtgcacaggcatacacatgcacacacacgtgccgacaagaccagcctggcctccccggctccaggccaccctcattcctgccacatcctcctgccctggaaaagcccgggcctggctgctggggcccagcttggtcacagacttcatggcatcccactgggcagtggggcctctctgggtggctcagcctcgatgtccgaggcctcaggagtgttcccccttgagtgttcacaggctgggcatgagtggaggtgtcatccttcctgccccccatgtgggtgtcctgggtgcccgcctcctccagagccgggtgttcccgggtccctgggaactgctgacctgcttctggggtgtgtcccagtgacaccttcactcctcacagcatggtgtgtgcagggccatggggacagctggttccataaccacaaaagcagatgaagagctgcatgtccccccacagctgggtcctggatctgggctccccctgggctgcagccatcagagaggacggaagttccctgagtggtaaccccgttcagggaaggatgcagcgatgctgggaggatggaggaggtggggacaggactggggagggcctgtaccacacagatgcctgcaggtgcctatggaaccaccagcaggagacccaagacacggtgacatcctcaccgtttctcatcagggcatcacccggggacagcaggtcacatctggggacatccgtggttgtccccactgaggggcgctcttggcacggagtgggtggaggccaggggtgctgctcagcgccctgcagtgcccaggacagctccctacagagaccgatctggcccccacatcagcagtgctgagactgagaaatcctgcgtgaattatttggaaaatattgagttacgtcactgctcacaccagacaccagaagaagctcctgacagggcagacggtagaaaccagggggaccccagctcctgggattcacctcctctctccctcctcactccgtgtggatttcagtgtgtgcagcctcctgggaccacagcagggcagaggatcatgggacatagtctcgtggagggtccatgggatcccctaacccagagggtctcacccacacgtgattcttgcccagggtacttttggtgatgtctggggacatctgtggttgttacaaccgggggtgctcctggcatgaagtgggtggtggccagggactctgctcagcaccctgcagtgcccaggagggccccaccccagagaatgatccagccccagtgtccacagtgcctgtctgagagaccctggaggtaaggaactccaagggccaggtcgaagggaagctaaactcatcaccctgtttggatggtctcagtagatatgttttaccttaaaagaaatgtaaaaatcctttctaaaaattcggctccccagggcacgcctccctgagattccatttccagggatagggtagggcccaggacactgcatttctcaggcaagatgtgatccttagccctcacttgaaaaagcttctctggggccaggcactgtggctcacgcctgtaatcccagcactttgagagaccaaggcaagaggatcccttgagcccaggagtttgagaccagcctgggcaacatagcaagaccccatctctaaaaaaaaaattgcctggacatgatggtgcatgcctgtggtcccacctacctgggaggctgaggtgggaggatcacttaagcccaggaggttgaggctgcagtgagccatgatcgtgcctctgcactctagcctgggtgacaaataactcggctgggtgcagtggctcacgcctataatcccagcactttgggaggccgaggtgggtggatcacctgaggccaggagtttgagaccagcctggccaacatggtgaaaccccatctctactaaaaatacaaaaatgacccgggcgtggtggtgggcgcctgtaatcccagctactcgggaggctgaggcagtagaatcgcttgaacctgggaggcggaggttgcagcgagccgagatcacgccattgcactccagccagggcgacagagggagactctatctcaaaaaaaaaaaaaaaaaaaagacacagccccagaaggccaggcatttcggctccagagctgggactccaccccagcctcctggaaatacccaaaatggccctctttggggctctgtgttcccacttcattttgaagacagggtgaaagtgtcaaggggcaccgtgtcatctccccactcaccccaaatagcagcagcagcggctcctgcagtagctaacattcttccagctgggtggctgacgttccctcggaaagcagggctgaaggcatcctcagagaatgccccgatgcccagggatctgggacggccatgggcttcacctgcacaggcacccctggcccaatcctcacagctgccactcccacactgctcccgatggaaattccagagctttacagaatcccctgttttatgaaaaggggtagacgtggcagctcaccccaggtcgcacagcctcatggccagccggggtttgaaccctggaccacctgcttcccccacacccaggggctttccagggggtgcctggagggggagggaagccgatgtttggtgggtgagcctccctgagtccatccgttttttgtttgtttgtttacttgcttgtttgtttttgagacagtttcacagtttcattcttgttgcctgggctggagtgcaatggcgtgatctcggcccactgcaacctctgccgcctgggttcaagcgattctcctgcctcagcctcccaagtagctgggattacaggcgtgagcccctgcacccgactatccatctgttttttgtgtttgtgatggagtcttgctctgtagccctggctggagtgtagtggcgtgatctcagctcactgcaacctctgcctcctgggttcaagcgattctcctgcctcagcctcccaagtagctgggattacaggcacccgccaccacacccacctaatttttgtatttttagtggagacagggtttcaccatgttggccaggctggtcttgaactcctggcctcaagtgatctgcccacctcagcctcccaaagcactgggattacaggcatgagccactgtgcctggcctctgtttcttcattcattgattcactgaggaaggtgtgaggggctgagctgctgagttgggggctgtgggggcttttgtcccaggcagcctgggaggtagtgaggcccctgtctgcagagtgatgccagcaagtcactgcagaggggggatgcacctcatttcagccccagggaggctccgttccttcctcccgcgtggacgagggaaggcagagctgagctggggcttgtctgtgcgcccttagccagtcagggtctaactggacttcggatctgactgtctctgccctccctgccaccttctctagggctcgggtgactcccaggtgatggggcagccctgagccttcccatttctctggaaggagagtaggcaagggccaggagcgaggcccaggggcacgtgttgatacccagctctccatcccccggctgtgccgccctggctagccccttctctgctctgagccttcgtttactcctctgtgtaatgggctcacagcctctccccctcaggattctggggtaagaggaggcggggtgatgaggcttcctatcccttcggaggctggctttggggaaggtccagggctcatggggtgtgaccagcctgtgactctctcgtcccatcccctccacaggcatctcgtccccggtgaagaagacagagatggacaagtcaccattcaacagcccgtccccccaggactctccccgcctctccagcttcacccagcaccaccggcccgtcatcgccgtgcacagcggtaagcgccacgggcccctggcggggaggggcggcgggccctcctatcaggcctctcacagccggggaagtcccactggatgtctgaccatgagtcctattgctgtagccttctaggtgggcaaaaaaccatagaggtgccgtagtggagagcgcccagggccttgttccagcccggctgagaggttggactcagtccctttgggcctcagtttcccccctgtataacaaaaggctgcaacctaacttcacctcactcccctcacccccgtctcaatctaatccccccattccaaccccagacactgatggacaggcaggatcagaagctgccaatgaggccaggcacagtggctcacacctgtaatcccggcactttgggaggctgaggcgggtggatcatctgaggtcaggagtttgagaccagcctggccaacatggtgaaaccccatctctactaaaaatacaaaaattagccaggcgtggtggcacgcacctgtagtcccagctactggggaggctgaggcaggagaattgcttgaacccgggaggtagaagttgcagtgagcagagatcacaccactgcactccagcctgggcaacagagtaagattccatctcaaaaaaaaaaaaaaaagctaggcttggtggctcatgcctgtaattctagcactttgagaggccgaggcaggcagatcacaaggtcaggagttcaagaccagcctggccaacatggtgaaaccccttgtctactaaaaatacaaaaattagccgagtgtggtggtatgcgcctgtagtcccagctacttgggaggctgaggcaggagaatcgcttgaacccaggaggcagaggttgcggtgaggcgagttcacgccattgcactccaacctgggcgacagagcaagaccctgtctccaaaaaaaggctaagtgcaagtggctcacgcctgtaatcccagcactttgggatttcaaggcgggcggattacgaggtcaggagattgagaccatcctggctaacatggtgaaaccccgtctctactaaaaatacaaaaaattatccgggcgtggtggcaggcgcctgtagtcccagctacttgggaggctgaggcaggagaatggcgtgaacccgggaggcggagcttgcagtgagccaagatcgtgccagtgcactccagcctgggtgacagagcgagactccatctcaaaaaaaaaaaaagagacatctccatctcggccaggcacagtggttcacacctgtaatcccagcactttgggaggccgaggcaggcggatcacctgaggtcaggagttcaagaccagcctggacaacatggtgaaatctcgtttctactaaaatacaaaaattagctcggtgtggtgatgcatgcctgtgatcccagctactcaggaggctgaggcacaagaatttcttgaacccgggaggcggaggctgcagtgagccaagattgtgccattgcactccagcctgggcaacagagcaagactccatctcaaaaaaaaacaaaacagaacaaacaaaaaatcaccttccatggttgccattgggattaaggggggtgaattgtaggaagcctcaaatattgcttaccaccccatgttctagtgatcaactatttagttctttacacagtcatgcacacagagaggcagtcccaaatcaaagcagccatttgggccaggggtcagcaaacgctggccccctggttgcctgttcttacgaataaagttttattggcaaacagccacgaccacgtctttgtatatgtcctgtggcagctctcaccctgtcttggcagggctgagtaattacagcagagaccacgtggccaaaagccaaaaatatttactatctggccagaggctgtggagatgagggagtgactgctataaatagtgaaaatactaaaaatcactgaactgtttagaaagaggaaaaggcaggcaccacaatagaatatgactcagccatgaaaacgcacgaggctctgacgcaggccaccttgaggacgtcatgctcagtaagagaagccagacaaaaaggccacacagcatgtgatctcatttctatgaaatgtccaggacagggccagccacagaggcaggaaggggatgtatgggtgctggggctgggggaggaggtgaggagtgacggctgatggagacggaatttctttatgtgctggaattaggccgggcacagtggctcatgcctgcaatcccagcactttgggaggctgaggtgggtggattgcttgagtccaggagtttgagaccagcttgggcaacatgatgaaaccccatctctactaaaaatacaaaaaattaaccaggcgtggtggcacacgccggcagtccgtgctactcaggccgaggcaggaggatcacctgaggtcaggaggtcaaggctgtagtgagccatgatcatgcccctgcactccagcctgggtgacaaagcgagattctatctcttaaaaaaaaaaaaaaaagatcactattcagccatttgcagaaagagcttgccaaccctagatttatagtgtagactgtggggccagatgggctgggttcaaattcccggtctgccatctgatgccgtgtggccccaggcaggtgacacatcccctgaaggccaccctgtcatcctctgtttaaaaaaaaaaaaaaaaagacggggccaggtgcagtggctcacgcctgcaatcccagctctttgggaggccaaagtgggcggatcacctgaggtcaggagttcaagaccagcctggccaacatggcgaaaccccatctctactaaaaatacaaaagttagccaggcatggcggcgtgcacttgtaatcccagctactcgggaggctgaggcagaattgcttgaacccaggaggtggaggttgcagtgagctgaggtcataccactgcactccagcctgggtgactgtctcaaaaaaaaaaaaaaaaaaaaaagaccaggctcagtgggttacacctgtaatccccgcactttgggaggcctaggagggaggatcgcttgagcccaggagttcgagacctgcctgggcaacatagcaagacccccacctctacaaaactaaaaaattaaattaaaacacaaggataatatcacagccccagtggggttgccgtgggagtcggggaatttgggtgtcaatgtggtcagtgctgctgggtttttttggtggttattgttactaaacgcactgagatgccggcaggaatgacacccacagacacacagtcacacggtcacagagcagaccggctggagcccccaagtaacccccgcttcccactgtctccgcagggatcgcccggagcccacacccgtcctccgctctgcatttccctacgacgtccatcctaccccagacggcctccacctacttcccccacacggccatccgctacccacctcatctcaacccccaggacccgctcaaagatcttgtctcgctggcctgcgacccagccagccagcaacctggaccggtgagttgggcggggcgcattcgggcctctcctggcggctccaggtgacctcccgggggccacgtgctcacacgaaggcacaacctctgcttaaaagggtcttgaggacttggctctgaagtcccctcctctgtcgtgctgggaggcagctggattgggtcagaattgagatgctttcggatgtcagggtttcgggcgcatcatgtcgcaccctgtggggtctgggtagcacccgtaggtcccagcaactgcgtgagtcgtactcatgttaacacaaggcagggagggactgggcatagcggctcatgcctgtgatcccagcgctttcggaggccaaggcgggaggattgcataagcccagagttcaagaccaacctgggcagcatagcgtgacccagtttctacaaaaaaaatacttaaaaatgagccacgcatggtggcgggcgcctgtagtcccagctactcaggaggctgaggtgggaggatcgcttgaacctgggaggtcgaggctgctgtgagctgtgattgtgccactgcaccccagcctgggtgacagaacgagaccctgtctcaaaaagaaaaaaaaggttggggggcggggggcaggaagacattgattacaaaaaaaccaccaaactcagttcgagcaagacagcgtttgccagactccacaggaagctttggatgttcagagcttttcggactttggaaccacgggccaggccgtggatgatggtggatgatggcgtgctcgcagtgaattaggaaaaacgcggagaacctgctgttaggaggcggtggcactgtttggaaggaaatcagtcgagttggcgtgcagggggtttacagaggagatgcagtgagcgtggccccagtagtgccgggctttgagtgacaccagcaagcgggtgtccccaggcccctccacctccggccgtcctcagacccaccaaacccgccatggtcacacccgcgccctggccccccagcctgccaccccgtccgggccgtgcacagagccgggggcggccggcgccagcagcccgaggtagagggggagcccaccccttaaccacgtgtctctctgttcccccagttaaatggaagtggtcagctcaaaatgcccagccactgcctttctgctcagatgctggcacctccgcccccggggctgccacggctggcgctcccccctgccaccaaacccgccaccacctccgagggaggagccacgtcgccgacctcgccttgtaagcacgcgggaagcggtgccctggtggggcggatgtccgcaggggggcctgtcccctccccagccccactgccaggtcagaggtcaggcccgaccctgcagggcctggcgagtttggtgggtctccggaaaacagcccagtggccacgtggttgggcccatgtagggctgaggcagccttaggggctggccggaccaagcctcgggccagggtgagagtccagggtctgtccccttcgccgagtcacctgggggaccccggtgcccgccgtgggccgtcagaaaccctccctggtatgtcaggcagctgacagtggacacggatctcacagtggcggcccgagggccagactcgacccccagactggtcttttgtttgtggagaaagagaatcggttgttatcattttaaaatcaggacgttttacataaacatttccagagttctggcttcttggggagaaaggagctacaccaggcccagttcctttgggtgacctgggctggaccacacctttagatgggactctcttcgcctgtccacctgacctggaagcccctgggttggcggctgctgcaccttctagatttttctgctctctggatgtggttctgggtggctgctggatggcccctcggtcctggcatccctgtcctgaggtccaccccattcgtccgcagtggctctacccccagactctccccacgacccccatgcaggcttgggtgggtcacccaccctcacagggcgccagacatctctgaacccagagacctctccccatggactccatctgcccctcacccccctttttgagcatctctgtccctcactctccaaatgagaccccccaccccacccaagcagttggtggccacggttccttctaggtgccctcagctcctcttctccctgccccggcgttcctgtccccgtccccactgcgtgccagaacccaggctgcctgcccataaaaaccggcttctgatcactggctggaggagatcagccccaaatccaccctgggctggaatcccacctctgcagctctctcactgtgtgacctcaggcaggtgtcttcccctctctgagcctcagttttctcagctgcaaagtgggtttgccttggtgcccaattcacagggcagtgggggacaagccggtgacatgggtcagggaggcagagaggacattccatgtggcgcctgatgctgcgtggtgtcaggcagctgtggtcattcttgccggctgtccctgcctgctcatctgtgaaatgggagcgttgactgcataggatccagtcagggctcagtgggatcatgcccagagcctggtattcagtagacacttaataaatgcaggatactgcgtgggatccactcagggctcgatgggattatgcccagagcctggcatacagtagacacttaatagatgcaggatactgtgtaggatccactcagggctcggtgggattatgcccagtgcctggcatacagtagacacttaatagatgcaggatactgcgtaggatccactcagggctcggtgggattatgcccagagcctggcatacagtagacacttaataggtgcaggatactgtgtaggatccactcagggctcagtgggattatgcccagagcctggtatacaatagacacttaatagatgcaggatactgcttaggatccactcagggctcgatgagattatgcccagagcctggtttacagtagacacttaatagatgcaggatgctgcttaggatccactcagggctcggtgggattatgcccagagcctggtatacagtagacacttaatagatgcaggatgctgcttagtatccactcagggctcaacgggattatgcccagtgcctggcatacagtacacacttaataaatgcaggataggcatggattccacccccctttccctgcaccggggctcttaactgcaaatctactcctacttctccccataagcctcgctgcctccagctccccccaaccccagccaggacaacttggggaccctgcctgttgcagcttcttctccccctacctgggtcccggcctgtctgaggcccccatccctgctgtagccccaggccgtgagttactcacacgccgacaaaatataatcgctgaggctgaaatataaatacgcacatctgtatgtatgcacacacccagccctccctctgccctctccgggaggaagattaataaataaaacgccctcaataattcatgcaccccgcgcggaggcagccctcagtggcaggaccgggcgggcgctgcccaccctgaataattcacgggcggttttgtgaattacagagccatcctgccttccctctcagcagacaccccgcccacctgggcgatctcagccgtgacccccgggcccctcgagtcaggatccccgcctcccaaggaccttgggcctttcaggggggcccggttcaactgggggtagggcggcaggctcggaggccccaggcactgggtgcagaggcccggctgtgtgacgcctggcggtggccaccctctctggggccagggccgccccggctcccacaacccctcgctaacgggctctcggtctctctcctccctgcagcctactctccgcccgacacgtcccctgcaaaccgttcctttgtgggattaggaccaagggatcctgcgggcatttatcaggcacaggtaggggccgagaggccggctggtggggtgggaggggcagggcagaggggccggcccggggggctcagggcgaagagggcctgctgggtcccacgccacacccctggcacaggggcgccagcctcccacaccccacctgggcctcgagcccccacctggcctctccctgaggccaaatttccctccaccttggtcctggggggatggggtgtggccccagactcagcctgtggggtccccaggagcgtctctggagaccatcgtggtacagctatgggaccagtgtcattaccacctgcttcccatggtatagatgggaaaactgaggcccagagagacaagggggtctgcccagggtcacacagtgcatcaccctccctcctccagcctccatcccccatccacgccgaggcctagagggaccgcggggtggccgggggaaactgaggcagcccatggcggggcgtggggcctcccaggacagcatccaagcccccaccccaggcttcagcccacatctaagccagtgtgaggagtcagggcggagaggcttcgtcagcaggacagacaggatggggcaggggccagcgttcatgttcacgttgatgttcatagtcacgtacatgttcagacggctgcagctgagtgagcatggccggggtcccaccacccctagaaggcaggcaggcaggcaggaggttgacagaggaggctcagagaggggaagtcaattgcctgaggctgcacagtagtctagggagtgggggcgtgggagggcagccttagccccaggcccaggtgtccctcaccccccacccccataaggggctctgtgtaggccaggagtgtgtgagcgcgtcttcgggttatgggtaagcagctggacctttgagcctctgctctctccccggtttgtgttggggagagggttggaggatgtaggagtggctgccacaggcccgggaggtccagactcagagagaaacgagctctgggctacccagcggccacggaactgcagagcgtggagatgtatggggtccccaggggccgtgttcaaatcttccagccactgagggaggtttcctgctgcagagcccacgggcaagggtcacggggcctccccgggaccctgcggggctgtcctggctgagcggatgggggcggggaggggacatggcattccccctccctccctgtgctgggtgcccaggatgcctgtaagcggcccctccctctcttcccaggctccgcaaaaccagccggaggaggaagcagggatggaggctgcttctcctgagttcagaggagatccatgtgctatgggtggagggaatcctgggtcaggggccagggctccagcccagtgctggctcacccactctgaacctctgtctcttcctctggccttgggcacccgcaccaagagcctttgaagggcactgggggacagaaagggcactgaaaggttcaggcttccccacaccccgtaaatattaagtaccctgccttgcacccatagagccccggagagggagtaacttggtcagggtcccccagcgagcagacgtccaggactcctcgctttgggatttgggccccctatggccaacctctcccccgcctggtgctgatggagcccggcattacctctgccacccccaccccacatcgctccctgcccctgcgggaggctgggaacgtcttaagtggttcagaaaccaaagctaataaaagctgcggtgggaggaggcccagcccgcttaacccttccccagcctctgccttggaccaaactctctgaccaggccctcccgccagggcccgggacccttctctcagactgtgctggctccagccccaccccacccaagcctgggagggaagggaaactgaggcaggcaagggtggcacctttctcagcatccctatcttgactggctggactcctctggggacccagaaagggtgggaccagggctggcagaatggggtgtgggggggcactggcaaggggctcagcataggcaatggtgtgggtcgggggagggggagctggctggaatgtgagagatctccggtggcaggggccagacagatgatgcgggctttgctctggggtagtggggagccatagaagggtttagagggagggagtggacacccaccaggcctgggagtcagaactttctggagcacagaaaggaggtgacacattgtcaagaggctctcaggggagcatgggttagggggaaggcgaggtccccaaactgggcatccagggagcacaggtctggggaggaccccattgctgctgccctgactggactaagagcacctgggttgaggccgggcgccgccacctccctgcagaccccggagagagggagggaagaagcagtgagatcccgctctcccctctcccagctcccgctcaaagggccctgagcttggaggcctctcatttccgattctggccagtcagcacttctgcctccgcctcctctattcctggcggattcgcttccctctgccccctcctcccccaaagcctgggtgggcgcgcctttccctctgcctctccggctcccgacaccccccagtccatggactctccccccatcaatatccctccccgtgatctatgctaattgatctcgccctggtcagttacccacccatcgccccatgtccgtccctatcaatccccccactgtgaggctgggtggctctgacgccctggcccctcccctctgtgatgtccttcacgcccctacatttctcctgcacgggaacccacgtaagcagctgggtaaaccgagggtggggggcaaggcgggcattgagccacatgccgggagccacacaggcggctgcagccaggccagcaggataccagagcccaaacctcccccttcacacctactgcctcagtctcccctcagctgagtgggaggatgtggagttgagggtgcccccaccccacccccgccccattgctggggccacagccaggcaggaaggggaggggagggaagggaggagggaggaagggctgaggggaggctggtccaccacggggagggtcacgcccagagtctgtcggttgccaacagaaaccagacatgaggtaatggccaagatgaacttgaacttggctggaggtggggcgctgggaaccactgtggcgccagttccatgggctggcccagtggctgcctggttggaggggctctgttgaatgatttgctgcagcggtggggggcggccccacctctaacctcagttggggagtggaggggtctccccagttccagaggcacagccctcccctcacagtccaccctggatgctccatctggggttggagtttgcgtttccagggcaggggtctggacagcagcttctctgcagagactgaggccggagctgtccccaaatgacgtgaccttgggtacagccccatgcagaactcccctcccttagcctcggtctcccgcctctgggaggttgagagtcatcctcagcccccctgtgcttagtgagcttctgtggagcaagagggggccatccgggggacctgtgacaggatgggccctggacgcccaggacagtgctcagaagatgccaaggggattcctgagaggcaggcgagggggttggccctgggcaggagcagaaatgagagccagagccagacaggcctgagttcaagttccacctctgccgcttccatgctggtgacctcgggcaagttccttgacttctctgggcctcactttcttcacacaaaacagcggtggagggagacctaccccctccttcacggggataccggggacatcattaaagaggagaatttttttttgtttttttttggtttttttggtttttgttttgagacggagtcttatgctgcccaggctggagtgcaatggcacgatcttggctgactacaacctccgccccctggattcagacgattctgctgcctcagcctcccgagtagctgggattacaggcacgtgccaccacgcctggctaatttttgtatttttagtagagacagggtttcaccatgttggccaggctggtctcgaacccctgacctcaggtgatccacccaccttggtctcccaaagtactgggattacaggcatgagccaccgagcccagcctcttgtttactttttaaaaacattctcaaggccatgtgcagtggctcatgcctataatcccagcactttgggaggccaaagcaaacgaataagctgaggtcaggagtttgagaccagcctggccaacatggagaaaccccgtttctaccaaaaatacaaaaattagctgggtgtgatggcgcatgcgtgtaatcctagctactcgggaggctgaggcaagaaaatcacttgaacccgggaggcagaggttgcagtgagccaagatcgtgccactgcactccagcctggtgacaagagcgtgacgctgtctcaaaaaatcaacaaaaaacctctttataaagtgaacaaggcagctgatgtggtggctcatgtctgtaatcctagcactttgggaggaaggagttcaaggccagcctggtctacatggcgaaaccccacctctacaaaaaaaaaaaaaaaactagtcagatgtggtggaacatacctgtggtcccagctactcgggaggctgaggtgggaggatcacttgagcccaggagatggaggctgcagtgagctatgatggcaccactgcactccagcctgggcaacggagcaagaccctgtctcaaaataaaataataaattggctggccacagtggctcacgcctgtaatcccagcactttgggaggccaaggtgggcggatcacttgaggccaggaattcaagaccagcccggccaacatggcgaaacccggtctctactaagaatacaaaaattagctgggtgtggtggggcgggcctgtaatcccagctacttgggaggctaaggcacaaggatcacttgaacccaggaagcggaggttgtagagagccaagatcacaccactgcattccagcctgggcaacagagcaagactctgtctcataaataaataataaatagagaagaaaataatttttaaaatataaaataaaggccaggcagagtggctcacgcctgtaatcccagcactttgggaggccgaggcgggcggatcacgaggtcaagagagtgagaccatcctggccaacatggtgaaaccctgtctctactaaaaatataaaaattagctgagtgtggtggcatgcgcctgtaatcccagctactcgggaggctgaggcaggagaatcacttgaacctgggaggcagaggttgcaatgagccgagatcatgccactgcactccagcctggcaacagagcgagactctgtctcaataaataaataaataatataatataataaagtaagattgagttccagactgggagtgctggctcacacctgtaattccagcactttgggaggccgaggaaggtggatcacttgaggtcaggcgtttgagaccagcctggccaacatggtgaaaccccatctctactaaaaatacaaaaattatccaggtgtggcggtggacgcctgtaatcccagctactcgggaggctgaggtaggagaattgcttgaacccaggaggcagaggttgtagtgagccaatatcacgccattgcactccagcctgggcaacaagagcgaaactccatctcaaaaaataaaataataaataaaatataaaatacagttccagataaatggatcttttgtgtgtggtgtgtaagtatatccccaatgttgcgtgggctagacttatactaaaagaattctgtgttaaccagaactccagtttcactgggcatcctgtactgtgtctggaagcctccctcagagacaaagtcacttgccatgggtcacccagcaggttgttagagcctgggatggggaaactgaggtcacagggttgcaggaggtggggggtgagcgtgggaagaggtaaaccatgtctgcagcagagtctgacccctcgacttctctccctttttctctctccctctttctgtcgccactgggccactcagtcctggtatctgggatagcaaaggtcttcttccctcgccccttctccatcgtcccaggaatcccagggggcagcacagccggcccccggcccacgttttcggtggaaaattagagtgaacaagaacacccctgccgactcccagcccggccaaaaagacaaaacacatagacgcacacactcaggaggaaaagaaaaaacaaaggcagaagaagaagaagaagaaataaaaacccacccaagcaagaagacaaaaggtaaagacgcaacgtttccaactctcgggacgccaaggccgcaggactggagggccaggccccgccacccccacgggagacccgggacagggcgtcttcctaagttattcatctcctctccgcctgctgctcgggaaggacagacgccggccgcccgcccgcgccccggaggccctggctctgtccggagaccaggtgagcacagcctggagcctgtgcccagggccgacaggcgcgacacccagcaaggccacctctccccgggcccccgcgcctctgccggacacggaccggcccctcagcccccaccgaggacgcagccactggggggaaagggagacacagcggaccccggccgggcagcggagaccgcagaggcgggcagggtggggcaggcgagtggtgtcgcgggggtgcgtggcgcttgcgagccctggccaggggaggaagtgaggcccaggcacctgctgcccctcgagggggccctgcctgccgcggggcctccccacaagcccctcccaaagcgccggccgactcgctgtctcgctggggactctttcagccctcgcgcccgcccgtttgggaggagaagtctctatgcaattggccccggcccctccaccccccacccccggcataggaggcccccccacctcgcccggctcacacccccaaagggagggacccacattgcacacactgtaagaaatgcactttccgaggaaggggatgggggagcccggacacccagagctccccgagttgggggtgcccgtctggagcgcccccgtcagcccctggcggtgggaggtgagagcgagtggtttaagtgcctgattaccaccacccgcccccccctttgtccagctgggacacggaatggccgcgggcctcctccccctcccctccagcctctccaccagcccctccagtcaaccctcatcgccgtgcccccccagagctagagagatggggcccctgcgtggcccgaggggcagagctgggcgtcacttcgcaagcgtcctgccctgccggggcgcgggggtgggctctggggaagccggtgcgccccccacgcctccgctgccagtgccttacattctggagcgacccccctccctggtgcctcccagcgaagggggaccgccgtttgcactttcatcgcctaccccgacgcggggcccagctgcgggacgtgcatcacggctgggcccccagaggagagaggaggccgacgccagcggtccccgctcggaacggggagggttttcggggggttcggcgtcgcaccttggggccccccgcagccgtgtagggggcctcccatctgctaagcgtttttccgttgagccgctccaaaaacactaagctggggacgccaggtgcccccccaccccggctccctggccctatccacacctccacccccaccccaggatcgccatctttaggggaggcctgggagggggtgttaggtgttttagggccaccgagctcaaacacaaggacccctccccggcccacccagcccagccccaactgacctccatgcctagggaaaaactccccccaccactgccccctcccccgacccaggccaaagccagggcaggtctccgggtctcacctgctcctagcctcacccccctgcccccgaaaaccagactctcctcccaaactagcctcaggagcttggcgaacccgctcgctcctaaagagaaagacccaggaccctcccccatcacccccaagagaggttcgccatcctctggcctcgagcccttggtccctccgtccgtctgtcctcggggcccgctcccccggtggcccttggggatcaaagcgtgggccgctctccgggagggcgggcgggggagggggtggtcgggttgtgccattggggtgtccggaagcttctcagccagggtgggggtcgtggagtgggggagggaggccagccgggctccagaggggtcagggcgcgacgagaaccaactctttacctaactttgcatggtgcttagtcaaggactcctgcgacctggctcccgaggtcagctggcggcgctgacacacatgcatggcagactatccctggctctatctccctgttcctcgccccctccaccccccacttcctctttaaaaaaaaaaaaaaaaaaaaaaagatacaagaaaaacctttaaaaaaattccatgtttcctaatttgcacgaaattttctaccacaagatgtgccttgccttccgagaataagtattacctttaaacaatatcagcgcacacacatagctgcatgttctgctcgtgtagtttaaaaaaaaaaagacaaaacagtgacatgaaataaaaaataaaaattgaaaagggatgtatttctatttgtaaaaaaaataaaataaaaaataagaaagtgagaatctaaaaaaaaaaaaaaaaaaaaaaaaggaagaaaaaccacgctaaaaatcaagccactgaaaacaattgcccccaggtctacccagcccctggctgtccttggtcctgtctcccctcctgctgtattcaggggtgccccctggtgctcagcctctaccacccccaaccctgctcttgggtacccagaggggtcatttctgaatcccttgcccagaggacagacctccggggcccatcttggccctgggaaagggctctcctctctgattggtccctaggccacgggccggcccccagacaccattcaccgacccactgcaggctgtcctccaaccatggggtggccactccacccgcagccagactccccgctccccacttttcatgcaggctggcatacccctggctcagggtcaaatgctgttccacacccacctcagaggcaccccctctcccctgccccgtgcatccccacccttcttgccaaaggacctcttttcccctatccagagaccaccccaggtggcattctctcccaccttctcctttgtcccccatcccctgtctctgtcttccagctgtgaatatgaagggtatcctgtatgaaacaaaaacaaaacctgatatatgcaatatctgtctgtctgtctgtacccatgggcctggctcagccattggaggcccagccgagggtccggcagggcacagggacagccaggtggcaccgagtcacaggctgtggtccggtggctgagcatgctgttgtcttgtccttgattttattttcttttgttctttttttttttcttttctttttgtttttaactccagcttcctttgctttttacttgaccaaagctaagacaatagccagatggttagtggggcagccaggcagggaggacccagggctgggattctccaaccttaggccattcctgcagccctcaccacctccagcccctccaagcatctcgtgtagggacccacgcagatggtcccattcattcactattgcccccaaccccgggattttgggtggtctccacagccaccatcatacactcatcccgtgttttcttccaaaaagtcacctcagcagcctccccaggcgatacagagggagagcccagaccaccacagctggccacgacattgcccttaagtaatatgcattggccagagagcccgggctggctgtgcacagcattcatgtagctgatttctagctttttttttttttctgccccactcctgagcaaatctgtcttgccaaggaactaggagcaaccggaggcaaagggagtgggtggccccatcactattgggaccatcgcgtccctgcacagcccacacccgggggcccagagtcctgggctggacgccacccttctcaccccgagcttgcctccttggctcacttggcaccttggctgagtacagcaggcaaaagcccataccaggcagcatgttgtggatggtttagttctccccgcctccctgtttcttggaaaagctacagggtccctgtagggcaaaattcccaggcgccttgctgcagacagagtaagacaaaaacaccaggaagcaggattccgtgcccatctctgcagtttgggttcacaaaagggggtgccgtcatccctgggtggaggagggagtgttggttttttgtttttgtttttttaacatgtatgaaactgacatcttctcaaatcttgttccacccccctctggaagcccccatcacccacccctgctatggacaccacacctatgccaggcccccccccccaccccagtctcattctggggtctgcccatgctgtgggaaagaatagggaggcctcccaaatatatgcaaattgtccccattccgtgggggcacctgacaatgacccgggtggagatggggcatggaggagtaggaagacccagccctatttgactggggagaggaggatctggagtccttcatgcccaggtctggaacccaggttctgaccccagggccccaccctgggctggacaatcagatcccaaaggaatgccaaaggggactcggttgggagagccgcttaggggccagacctgggtccccctgcaggtccccaggcagcagacaattccaccttccctgccccaggaccttgagagacagcagcattccaggcacagacagacttggctgcaccccactgtcccttgcaagacaggttctggagccaggagcaactgtccagccctccagaagagacagcaagcagcccccctacccactctggcctccccaatggtactttgacctccagtgtagggctatactatacatatatatatatatatatatatatatatataattttggaatttgtttctcataatacagaatatatagtggctaccttgtatcttggtctggattctctctctgagaccccggattttactttctctttggagggcgctgggacatacatctctcaatccagcttcctccgcatcctcccatcttgccccatttctgccacgtcagacacttcctgagagtctcaccttcaaaatgacaccgctgcccatccattgctcaatggtacagagtgtggggtcagtccaccacccttgacctcccggcagggcaaggtgaggaggcggacccaaagcagtaccagcaggacttgttgccagtgataccaaaacagacttttcccaagcagtgcctcacatgtctgctggtgtggctttgggattctcctgccccacccccccgtccatggcagccccctccccaaggctttgctcacacctgagacaggaaggaggaaggggatccaataggaatatgggccccggaggggaagtcatgcacccccaagccaccaccccccagccttccacgcacatctcctggctggaagagagccctccaaaaaggggacacaggctgccccggcccctcaactgcatccacaccccatcctctcatcttgggtcccagccaggcccccccaaaaccaaagccccctcaagtcctggggtcccagcctgtgcccccagcttcctgcccacccagccctgagcattctcacacagagaaagaacaagcaagggctccagggggacaggatggggcagggcatacagtggggggtgggggggcagctgggaggagggagggacaaaacaaaacattttcctttgggttttttttttctttcttttttctcccctttactctttgggtggtgttgcttttcctttccttttccctttgagatttttttgttgttgtttcctttttgtattttactgatatcaccaggatagtttactctccttctagctttctgcttaccgcacactggataacacacacatacacacccacaaaaatgctcatgaacccaatccggagaaggttccagcaggtcccccaccctcccctcctcctcctacttctcctcttgacagcgaggacaggagggggacaaggggacacctgggcagacccgccggctctccccccaccccaccccgcccctcacatcatactccaatcataaccttgtatattacgcagtcattttggttttcgcggacgcgcctacctaagtaccatttacagaaagtgactctggctgtcattattttgtttatttgttccctatgcaaaaaaaaaatgaaaatgaaaaaagggggattccataaaagattcaataaaagacaaacaaaaaaaaaagaaaaaagaaaaaaatgtataaaaattaaacaagctatgcttcgactctttctggctgtcccgggtcctcttttccatgtcccatgtgggttgctctgtgtcctttggaaaagtgaggggcagaggctgcagggagctggggggaacccccaagccccgtggatgggcaggctgggattctgaaagcttcagatcaagtgtcccctgggggcattagacaatatctggggacatttgtggttgccacgactgggggatgctcctggcgtggagtgggtggaagccagagacactgctcagcattctgcagtgcccagaaccaagattcatccacacaagacatccacagtgcctggcacggagagacctgctttgattgtttggaggggaaaaaaatcagatttgctccctgctcacagtagacaccagggtaagctcccgatggggtggatgacagaaaccagggagacctgcagctcctaggattctcctcctcgccccctccccactcagggtgggattccaatgtgtgcagcctcctaggacctcagcagggtggaggatcatgggacgcagtctactggggggtccatgaaatcccctaacccagggagtctcacccaagggcgatcctgccccccagaggacactgggtgatgtctcagacatccgcggttgtcacgactgggaagtgctcctggcatggagtgggtagaggccagggacgccgctcagcaccctgcagtgcccaggacggccccaccccagagactgatccacagtgcctgggggtgggggagacccactttagatggtggctttgaatgagcttctgaggccagacctgtcccagcaacgctcctggaggctgtaacctcttcccctttgtaggatgggctgtttcacaccccttagcctttgctcattcctgcctccccatctgtgcagacctttcacactggtgtcctcttccaccaggaagtcttcccacctttctccagcctggttccctcccccagcagtctcagagctatcggtgaattccatgaggcatctacggagcacccactctgtgccaggcacaggggattccatcccttcccttgtgccttggaggaatccaagcctggcacacagtcggtgctcaataaatgcacaaaatagcttctcttgctacctggcaaactcccagtcattgagcaaagacttcctgagcatctcctgagtaccaagccccaggacccagcagtgaacaaaacactcaaattcagatcccgtcttggagcctacagcttcctccaggtcaggaagaacagtgaacaacaagtagaagtggccgggtgcagcgactcacacctgtaatcccagcaatttgggaggccaaggcaggaggatcgcttgagtcaaagagttcaggaccagcctgggcaacatagaacccatctctacagatacacttaaaaagttagctgcgcgtggtgacacacctgtagtctcaggaggctgagataggaggattgtttgatccctggaggttgaggctgcagtgagctgtgattgcaccattgctgtccagcctggagtgcaacagagcaagaccctgtctccaatcaatcagtcgataaaatagaagtaaaagatgtcagaggaggtaagtgatgagtagggcaatgaacagaggaagggcggggagtggtcccatctagacagatctggagggagggagggaaggagcgtcctgaaattctggcagaagtcacagctcctgcaaaggcccgagggcgggaccatgcctgcttcattggaggaacagtgaggaggcctgtgtggctggagcagagtgaggagagggatggagggaggactggagggcagggaagggacggggcaggtcattcagggccttgtgggccacagggaaaatgttgacttttcccctgaaggaggtgggagccatggagggctgggggcagaaggatgggccccaacatggtttcaatacaccctcggccaggaagccttcctcacctgccccagcagagcttctgcccccaatcactcctgacccagccctgaccattcaggggcatgaccgtgtccagctctgtcccctccagactgggggcccctcccacactgaggtcagaggggagggaggctggggcccgggagaatcaggagtgtgaaaggggctgggtgcagtggctcatgcctgcagtcccagcactttgagaggtgggaggatcacttgaggtcaggagtttgagaccagcctggacaacatggtgaaaccctgtctctactaaaaatacaaaaattagccgggtgtggtggtgcgcccctgtaatcccagctactcaggaagctgaggtgggagaattgcttgaacccgggaggtaaagaccgcaccactgcactccagcctgggcaatggagcaagaccctatctcaaaaaaaaaaaaaaaaaaatagccaggcatggtagtgcattcctgtagtcctagctacttgggaggcagaggtgggaagatccctcgagcctgataggtagaggctgcagtgagccaagatcacgccactgcactccagcctgggcgacagagcaagaccctgtctcaaaaaaacaaaaacaaaaaaagagtaaggctagttcttgggggggctgagatggggccctccatcctgtccccaactccaaaaccccaaaagaccccaggttgggccagaaaaactctctttgcaccatgggctccttccatcctacccacaagaccacaaggcggggacgatccttttttgcaaatggggaaactgaggcacaaagaagcgaggtaaggtgcattgacagggcagcaggcacagtgcgtcctcgctgacacgaccccacgctgcttcctggtgacaggcaccgaggacaccgaggatgggggggtccgaggccccttcccacgtcccactcccaacttgggtcgcccccactcaccctcagcagcgagattttggcgcccccttgtgggcaggccggggacacccccccaacctcccccatcccagttcctctctgcagcgggaaacgggggctccagtcaggccagaggaggcttcttgtagagcaggggttgagccaaggtcagggggtctcagctggagtcaggggatcagccagggctggggtggaaactcagcggtggaaacttagcctccccttggatcttacggaaagcctcggtcgtgtccagcccttggcccctgggtgatgagattcctggctgggaggggagggctgtcccagtaatgcaggctgttgggttggtcacccctgactccccaccctaaaacgggggaaggcttgtgacaacccaaaatgcccccgcaaaaaaattccaaatgcggccgagtgcagtggctcatgcctgtaatcccagcaatttgggataccagagatgggaggattgcttgaggtcaggagttagagaccagcctgggtaatacagcgagaccctagctctatcaaaaaataaacataaaattagctgggcacggtggctcacaactctaatcccagcacttttggaggccaaggagggtggattgcttgagcctgggagttcgagaccagcctgggcaacacggcgaaaccccgtctctactaagaacgtataaattagccaggtgtggtggcaggcgcctgtaatcccagctactcaggaggctgaggcatgagaattgcttgaacctgggaggtggagattgcagtcaggtgggatcgtgccactgcactccagcctgggcgacagagggagactccacctcaaaaataaaattttaaaaatagctgagtgtggtgatatgtgcctgtggtcccagctgctcaggaggctgaggcagcaggaccgcttgagcccgggaggtcaaggctgcaatgagctatgatggaatcactgcactccagcctgggcaatagagcaagaccctgtctctacaaaatatttaatttttttttagatttccaaacgccccctagtggagaagtcctgccccctgcactccagcctgggaaacagagtgagaccttgtctcaaaaaataataaccatcctggctaatacggtgaaacgccatctctactaaaaaatacccaaaaaattagccggaagtggtggtgggtgcctgtaatcccagctactcgggaggctgaggcaggagaatcgcttgaactggaaggtggaggttgcggtgagccaatatcgggcccttgcactccagcctgggcaacaagagcaaaactccatctcaaaaaaaaaaaaaaagaaaaaagaaaaaaagagaaagaaagaaagaaagaaaagaagaaaagaaaagggccaggagcagggactcacacctgtaatcccagcactttgggaggcctaggcaggcggatcaactgaggtcaggagttcgagaccagcctggccaacatggtgaaaccccgtctctactaaaaatgcaaaaattagccaggcatggtggtgcatgcctgtaatcccagctactcgggaggctgaggcaggagaatcacttgaacccaggaggcagagattgcaccactgcactccagcctgggtgacagagtgattgcaccactgcactccagcctgggcgacagagtgagactttgtctaaagaaaaaaaaagaaaagaaaaaggtcctcattaagaaatggtcattgtggccaggctgaggctggagaactgattgaacctggaaggcagaggctgcagtgaaccaagatcacagcattgcattccagcctgggtgacagagcgagactccatctcaaataaaagagaaatggtcattgttcagggtaaggtccagggcctggagaaggtgaggggaagcaggagaacagaaactgggaaaaggaagtgctagtccctttccaagatattgcagggccctggggcacccccaccctccaagatacagctcccaggaaaaaagtcacgtgccccaaaacaaagtgaggtgggggaaggagcaaagatttgcttggagacggcgctcagggctcaaagtccagggctcaggacagcaaaaaaccagattgccgggggagtgtttaatctgctcagggcgtctgggcacctgtgcaccctgagcctccatatcatccgcccagccatcgcccgcagccccaaaagcagcctccttccccagaggtaaactgagtcccaagagatgacaggagcccttccaaagggctgttacgaatgctttaatgcaggccattgggaagcagctctcagctggcagtgggtgcatgggagaggggaagttctgttcagtagacatcaggcagagagaaaagaaatcaggcagtggggagaagcaggtggagccatgagatcgtggaggattgcgggtgtctcctcaaccagggatgctctccgagtataagaagaatcaccaggcagggaccaagctcaggaagaggggtgcatgaaaaccatgtttgcccagagagcccccaatgagggaggtggggtgggttccaagccttcttcacttgagaacactgtattctgaatcccagatggagtcatttcacgggcttcaagtccagggcactgcttttagggggcagaagaggcatctctgggggactgcctggaagaggcagccaggaatcttcacatgactgtgctctttgctctctcatggtctccgggctctttttcctccagatccagtcccaagttgctctctccttcctttgctgtctttttctccttcttcctcttctcttctttctccttggcctctttcttctctctcttgtcttcactgtagggatacaaaggccccaaaccataataagaaacagagacactcctatttaatggccactcacttgagccagcccatgtgatgagtattttacaagcggtatctcagtgaatcttcaaaataaccctaactacgcggcctcacgatttccatttcacaaagacagcaactaagactcaattgctccatggagggatggatgggtggatggatggatggacataagccaaaggctccctgttgcctcttgggactcagtttactcctggcaaaggaggctgcttttgaggctgggtgcagtggctggacagatgatatggaggttcacactgcatatcatcattgcaactaagactcaactgctccatggatggatggataggtgggtaggtgtgtaaagaagttagggaatagatgggtagatgagtggacaggtgggtggatagtgggtgggtggatggatgatggatgggggtatggatgactggatgaacgggtggatggctaggtgggtgagtggttggaaggatggatggatgggtgggtgggtggatagatggatgatgaatggatgagtagacagatgaatgggtgggtgggtggatgggtgagtggatagttgagtgggtggacggatggtaggtggataggtgatggatggatggtgggtgaattgatgggtgggtgggtggataagtgaatgggtggatgaatggatggatgagtgggtggatgaattaatgaatgggtgggtgaacagatgggtgactgagttggcgaatgaatggatgagtgagtgtgtgggtgggcggatgatggctgggtgattgatggatggtggatggaaggatgatagatggatgggtggatggatgaatgaatgggttggtggatgaatggatggatgggtgggtggatggatgagtagataagtagttacatgaatggactgctgcatggaggttgaataaatgaattggaagataaatgaatacattgcaggaaggagagactgatggatcagtggatgggggtatgcagaatggagaatgggtggatgggagtatagatggatgtatagatcaatgaatgaatgtataggtggatggatggatgagtagataagcagttgggtgaattgatggttgcatggagggagggacagattaataagtagatgaatggatgaattggaggaagaagagaatgacataccaatggataggtagatggaggatgaatgagactgtaggtgggtggatggatcaatgagctaatggatagatagactgatggatggacagttggagagtgaagactgcatagttcgatggacgcataggtgggtgggtgcgtgtatcagtgagtggacagatcaatgggctaatgggtaggtggactgatggatgggtggttggagggtgaggactgcacgggcagactgatagatggatgtacaagtggatggttgggtggatggatggaggattgaacaaggcagaaaggaagctacaggtacaggtgcacaggtgggatccagatcccccagtacatcctgggagtaggaatcatattttactggggctgagccaggtcttagacaaagccaccactcaggtcctctccctcaggcacatcttggactcagctgagactctcccagccaggctggtcacctcccagctcccactctcctactcctgtccccaagcctttgcccaagacagagcccccagccctggatggatggatggatggatggatggaaggatggatggatggataaatgggtaggtggatggatggctgtgtgggtggatgaatgagtgaatagatgggtgatggatggataggtgatggatggatggatggatggatggatgggtggatgggtgggtgggtggatggatgatggattgatgggtggatgaatagatgggtgggtggatggatggtgaatggatggctgatggatagatgggtgggtagatggatgggtgtgtgaacagatgagtgggtgggtggatgggtgagtgggtggatggattggtgaatggataggtcggggggtgggtgagtgaatagatgggtgatggatggatggatggatggatggatggatggatcatggatggtcggtggatggatggtgggtgggtggatgggtaggtgatgaatggatgggggtgggtgatggatggatgagtgatgaatggatgggtgagtgggtggacgggttggtgaatggatgggttgggggatgggtgagtggatggatggatggatggatggatggatggatggatgatagacagatggtgggtggatggatggtgggtgggtggatgggtaggtgatgggtggatgggtgatgaatggatggggggtgatgaatggatgggtgagtgggtggataagtggtaggtgaatagatgggtgggtgggcagctgggtgagtgaacagatgggtgatgaatggatgatggatggatggatgatggatggatggatggtgggtgatggatggatgggtgagtgggtagatgggtgagtgggtggatgggtgagtgggtgaatgggtgatggatgggtgagtgggtggatgggtgagtgggtggataggtgagtgggtgaatgggtgagtgggtggatgggtgagtgggtggatgggtgggtgatggatggatggatggtgggtgatggatggatggtgggtgatggatggatgggtgagtgggtgaatgggtgagtgggtggatgggtgagtgggtgaatgggtgagtgggtggatgagtggatgatggatggatggatggtgggtgagtgggtgaatgggtgagtggatgaatgggtgagtgggtggatgagtgggtgatgggtggatggaagatggaggtctgcatccctgagtcctctgtgggaatcctcaggttgggaggcagtcagagccataggaggcactgagtccaggtgggtcgcccatacctaggccttgtacagacacctacacaatcctacaccacagtcttcttcaacaggtatttattaagcacctcctgtgttccaggcccaatgctgggtatgaggacacagccaggacaaaagctaagttgcctacacaactggaaggcaccacgtaatgtctcaaaattagtgaacaactaagacagctccactggtgataagcatgaatcagacttggggctggggacagtgtcaggaaggctggtggccaggctggaaacccctgactagggactggaggaggagaaggagctgccagaagatacaggaaaggtgaagatcccagggcaggaatgtgtttgaaggattcaggacagcaaggtcatctgcgcacacccattcccccaccccgaggaggggttcacacagacccccagcatccgcacgcatagtacctctggtcctggtataggttggactccattctgaacgtggtctcctcctcgtcctcagccctgcagagataaagggaaaggtggaagggggcgggagaggagaaagggggcggtaaagggaaggaagcggtgtgacagcctcagcctctgtcccaacctcccagccggggctcatgaaccccaggacgcaaggaagggctgggctgcctggctcgttgtcttggggagacgggcgggtgcaagcccgggatctgggctctgagagtagaggttggaggagcagcagggaaatgggagaccttcggactttgaggctggtgatgggggtaccagagagggttgggaagctgggggtgggggcagggctgtgggggcagcggggtgggggcgggcacccacctggccttggaacaccagaggcggttggccagcaagaccaaatagacgatgaacaggaagccgactaccgcagccaggcccaccagccacggcttcaggcgatgctccgtggctgcaggaagttggggaggttcgactcagaggaagaaaaggtcagaagacccccttcccccaccaccctagcaaggagagagagaaggtcactgggggtgctccgacagagggggtattggaaagggacggagcttcagagacctggatggcgtaggggggtcgggagggtttagagagggggagggtaccttaccagagtgggagggagcctgggggcccagagaggggaggggcttataaaagaaggggggcttagaggggacggagtttacaaatcaggagggctcagaaggggcggggcttataatgcaggcagaggctcagggggaggggcttataaaggcggacctcagaagggcggggcttatgacaaaggagtggctcaggggtggggtttataaaggagaacaagctcaggggaggggcttatgaaggaggaggtggctcagatggggagggcttataaagaagagtctggggggttggggcttacaacagaggagctgttggggggagcttataaaaggaggcagaggcttagagggaggggcttataaaggaggagctcagaggggaggtgcttataaggggagagggtctcagagtgggaggggcttataaaggcggcagaggctcaggaggaggggcttataaagaaggaggagctcagaggggaggggcttacaacagacgaggggctcagggaggggtctataaaggatgagtgagaaggaggggcttacagaggaggaagaggctcagatggggaggggcttgtgaactagggggctcagagtgggaggggcttgtagaggaggcagaggctcagggggaggggcttataaagaaggaggagctcagaggggaggggcttacagaggaggagggactcggggaggggtttataaaggagggagagtgagaaggaggtgcttacaaaggaggaaggggctcggatggggagaggcttgtgaactagggggctcagagggagaggggcttatagaggaggcagaggctcagggggaggggcttataaagaaggaggagcccagaggggaggggcttacagaggaggaggggctcggggaggggtttataaaggaggaggagtgagaaggagcggttcacaaaagaggcggggactcagatggggaggggcttgtaaaggaggcccgagctcagagtggggccgagctcaaggcggggggttcagccaggtgtgctcagaagggctggagaggggaaaggctcgggtgggcggtggggggtcccttacagaggagggcagagcccagcgagagggaggccgggcggtactgcgggggttgagaagggcctccaagccactcttccttttcttcctgccccctctcctttttctcgccatggaaaattgggagatggtgatcacctgaccaactcccctatcccgcgacgccccctcccgcccccctgcacctaccctgctgggcctccaccggggagaggagcagaaactccagcaccagaagggcccccagggtctccatgacggtcgagtgagccagcagccagccagcggcggtcccgggtcggcgtccacaggtttggtgtgggcgaggccctgcctccccgtgataaggcacaggcggtccccgggcgggggatgcctgagacctgggagcggggcccgcccctggcaccacctgattgggcatcctgcccctcccctgccagctcctgccccatcgctctccctccgggaggccagactctggacctgtgtaacaattaactgagggagtccctcctccctgcaccctgccctggggaccatcagcctcagggccacccctttgtgatccctgctgcaggggctgagctgagatggctgcgacctcccgtcccggcccaggccccgtgccactctggacacagggggaactcacaaatacaactggaatatcttaagaagggtgcgcccacccagtgcctcacacctgtaatcccactacattgagaggccaacgcgggcagatccttgagcctaacctgggcaacttagtcaagccctacctctacaaaaatagaaaaattagccaggcgcggcgggcacctgcaggcccagctactagggtgtgctgaagtgggaggatcacttgagcccaggagtttgaggctgcagccagttatggccgcaccaccgcactccagcctgggtgacagaggaagaccctgtctcaaaggaaataaaaaaaattagaaatacaaagagttaccaaggctgggtacagtgtctcacgcctgtaatcccagcactctgggaggctaaggcgggagaatcgcttgaggccaggagttccagaccaacctcctcccgtctctaaaataaaaaatgtaaaacttagctgagcatggtggcctgcacctgtagtctcagctactcaaagagactgaggtgagaggatcgcttgagcccaggagttcgaggctgcagcgagctacgactgcaccactgcatgcaccaccgcactccagcctgggcaacagaacaagaccttgtctctcaaagcaaatttgagagtcaccttttgtgctctcagagtacacatgaggctccgtgctcggcaatttcacagatcgcatttccttttcttaacaccccgtgaaatggtgccggtctcattgtgcccaggaaagtcaaggtcacgcagcaggtctgacctgggatttgaagccgggtctgcctcgcccccagcttatcctgcctcgcccaggctcttggcccctgaggacccacaagcagccatgggagcacacagggacagggaaggtgtgcagaggccacatgcccgtggtccacctgcaaaccgggacgctctcacgtggggatgcccgggagcgttgatgactcaggctccaggctctcctgtcctcaaccttggtccctcggctgattagatagtgggccctgcccgggcgaagggggaccccgccccagctgacacgggagcagccatggcccagacgagtggtaggaaggcccggcgtcatcgcacaggtgtttatggagcgcctgctgagtcgctgtcacttcctctcttccggaggtctgcggatgaccgctgagcagaccggccactcagcaggatggggctcacacatcccagccccaggatggccacaggtctgcttgaaccagccaggcaggcatctattaaactctgactgtgtatcccgtcttgtgcagggcttggaagagaaggaggccttggtgctgtctgggagctctcgatctgattaggaagtcaggaccaccccccagagacaagcaaacccagcagccgaggcgggggctggagaagatttggaggtaggggagcccagcagagggggtgggggcaggacccgccttggagatcctgccctccaaagtcagtcagttgtctgggctttttctgagaaaagcactctgtgctctgagaccttggcgaagccacttcatcactgcgtgcctcggtttccccatctgttaagtgggggcgatcagtcctacctcggaggattaaatgagatactgcatagaaaaagcctgctctgcacagcagcaggtacacgctaagcactcggtaaggttggccgataatattacaacgttttaaatcgccctagtgtttctaattcacagtttgctgacggcttggctgaggctgagccgggcaggctctgcgtatgtgaaagtcgccagcgtccaacccccggaacctgccggctgggaaggagaaagccgtccgctgcgaccgggcagctcagggtttgcagaaagggctccggcgcgcgtaagttctgtctacacgaccgccaaagcgtccggaacccggattcaggattcaagttgccatcagcttccagaaggagcttcgggatggggggtccttgaaggcaatggaggggcggcggggctccgggggaggcgggggttcagagggggctccctccccacccccgccggcgtcctcctcgccctgccaggccagggccagctgcaggtccagcccctccaagtcctcgccggtcaggctggggcgcagctcccggggtgcggcctcctggtctggcttcgggccaaacgcccagtctgcggcaagggagctggtgaggcaactccccggccccggccaccctcctctgtcccctcctcagctaggagaagcactaggatcccctgaccacccacccagggtgacccagcatcggccccagctgggtttcggtgggggcagctcaccggccaggtcgtgggcgaggtctttgatgaggtgcccgacgatggcgtaggcgacggccaccaccaccagcgcggccagcagcaggtacagcacgtacctgggcaggcggatgctgtccaggggcggcggccggtactcctcgtacagcggcggggacgggctccagccctcggcctccccctcggccgccagccccggcatggtgtccgcccggcacaggggaggcccggaggtgacccacacagcggaagtattaaggggctttgagctaagaggattgggcggctgccccacggccaccatctgcctgggttaatcacattgtaaatcacttccgcccacccgcaacctacctgctcagctccagccacgactctgcccagccgtccccacctcggggcctccgcacctgcgcttccttctcccaggaacgccctgcccagatttcctcatggccggctcactctcttcattcattcatctttttaattcttattattttattttatttatttaatttttcttgagacggagtttcactcttgtcacccaggctggagtgcaaaggcgagatctcagctcactgcaacctctgcctcccgggtgcaagtgattctcccacctcagcctccggagtagctgggattacaggtgcccgccactatgcctggctaatattattattatttttgagacagggtctcgctctgtcgccctgagtgctggagtgcagtgacgcgatcatagctcactgcaccctcaacctcctgggctcaagcgatccccccgcctcagtctcccaagtagcaggaactacaggtcctcgccaccgtgcctggctcttcattcattcatcgaatatgtattgagcagcgactatggctgggcactctcttaggtgctgggacacagctatgagtaagaaagaccaggccgggcgcaggagctcacgcctgtaatcccagcactttggaaggccgaggtgggcggatcacttgagacaggagtttgagaccagcccggccaacatggtgaaaccctgtctctactaaaaatgcaaaacctagctgggcgtggtggcgggcgcctgtagtcccagctactcgggaggctgagtcaggagaatcgcttgaacctgggaggtggaggttgcagtgagccgagatcatcccactgcactccagcctgggcaacatagcgaaactccgtaacaaaaaaaaaaaaaaaaaagaaagaccaaaacctgacattccagggagggagatggatgctaagaaagaaacataaccttagagtaaatgatatattaggttagaaagggaggtgtggctgggcgccgtggctcacgcctatagtcccagcactttgggaggctgaggcaagaggatcacttgatccagaagttcaagatctctctgggcaacatagcaagactgcatctctacaaaaactttaaaaactagccaggcgtggtgagtgcctgtagtcccagctactcaggaggctgaggtgggaggattgcttgagcccaggagttcaaggctgcagtgagctatgattgcacccctgtactacaacctgggtgacagagtgagactatctcaagaaaaaaaaaaaattgggctgccaaggcatcactgaggaggtgacatttgagcaaagacctggaggaaaaagggaaccagccatgggagatccaggggaaagagagttccaagcagagggcacagcccctgcaaaggccctggggcaggactgtgcctggcgtgttggaggaacagtgaggaggccagtgtggctggagcagagtgagccgggggagtgggggggaggggaggatggggagctgtcagggcaggtcctgcagggccgtgtagactgtgaggaagacttcggcctagaccctgaggaatgtgggagccatggagggctgtgggcagaggagggatgggtccggacccaggtgctcacaggtgccccctggtggctgctttggggagaacggactatgggggccagaggaggagccaggaggggactgagctggtcctagtggaaggaaagtaggcagatttgagatggacattttttttttttttttttttttttgagacagggccttgctctgtcacccaagctggagtgcagtggtgcagtggtgggatcttggctcactgcagccttgactgcccaggctcaagcgatcctcctgcctcagcctcctgagtagctgggactacaggtctgtgcccccacacctacctaattttctgtatttttttttataggaacagggtctcactatgttgcccaggctgctctttaactcctgggctcaagcgatcctcctgcctcagcctcacaaagtgctgggattacaggcatgtgccaccgcacccagccttgggatcgatttttcattaaaaaaatctgtttttagactaaatgcctgcaatgatggtgttgccatttcctgagttaggaacattgcagaggagaaacctggggagaaacacaaggaattccaagtagccaggggccagggaagccaggacaaggcagtaggaggtggtggtgaggaagacctgggttcaaatcccagctctgcccgtcacagcatgaccttggctctccagggttccctggcttctctctacaatggggtgggtaaagtttcctggggtgttgggaggaggaaattcaacaatgtgtagaagtgtgagccttcccgggcgggcgtggtggctcacgcctgtaatcccagcactttgggaggctgaggaacgctgatcatgaggtcaggagttcaagaccagcctgaccaacatggtgaaaccccatctctactaaaaatacaaaaattagccaggcgtggtgacatgtgcctataatcccagctactcgggaggctaaggcaggagaatcgcttgaacccgggaggcggaggttgcagtgagccgagatcccgccactacactccagcctgggcaacagagcgaaactccatctcaaaaacaaacaaacaaaaaaaagtgtgacccttgccaggtggtggctcatgtctgtagtcccagggacttgagaggctgaggcaggaagattgcttaagcccaggagctggaggctggagtgagctaagattgtgccactgtactccagcctaggtgacacagctagatcttgtctctacaaaaaagggggtggctttttattttattttatttatgattttattttattttgagacagagtctctctctgtcgcccagactggagtgcagtggcgcgatctcagctcactgcaagctctgccttccgggttcacgccattctcctgcttcagcttcccaagtagctgggactacaggcgcccgccaccacgcccggctaatttttttttttgtacttttagtagagacggggtttcactgtgttagccaggatggtctcgatctcctgacctcttgatccacccaccgcagcctcccaaagtgctgggattataggcgtgagccactgcgcccggtgagggtggctttttatatttttgtttgtttttgagacagagtctcgctgtgtcacccagactggagtgcagtggtatgatctcctcactgcaacctctgcctcccgggttcaagtggttctcctgcttcagcctcccaaatagctgggactactttccagggttttgttttgttggtggtggtggtgttcttttaagactccctctccctctgttgcccaggctggagtgcagtggggccatctcggctcattgcaacctccacttcccaggtttaagcaattctcatacctcagccttccaggtagctgggactacaagcatgtgccaccatgcccagttaatgtctgtatttttagcagagacaggatttcaccatgttggacaggctggtctccaactcctgacctcaagtgacctacctgcctcagcctcacaaaatgccgggattacaggtgtgagccactgtgcccagctttttcttgttgttttaaaaacattgcagctggtctgtgttgatgggtaaagagaggaaaccaaggaggcaggagagaaaagggggaagggctgaagtaatggctgtgagttgatgagaaggacgaggagttggtgaggaaaagaggtggctcaggcagccaatgtcacattggaaggtgccaccttggaagtggctccttcggccccagttgagccttcagatgaggcagccctggccgacagcttgattgcaacttcatgaaacacccaaagccagaaacatccagatacgcttgctgctcccagactcgtgacccacaggaaaggtatctgtcttctttcctctgtctctgggggttttcttgtcttctttatttaagatggagtcttgctcttgtcacccaggctggagcgcaatggcacacgatttcggctcactgcaacctctgcctcttgggttcaagtgattctcctgcctcagcctcctgagtagctgggattacaggcatgcaccaccacacccagctaatttttgtattttcagtagagatggggtttcaccatgttgtccaggctggtctcgaactcctgacctcaggtgatccacctgccttgacttcccaaagtgctgggattacaggtgtgagccaccgcatccggccttgtctttttttttttttttttaattaaagagatgggggtctcactatggtgcccaggctggtcttgaactcctgggcataagcgatcctgccttggcctctagagtagctgggactataggcatgtgcctctgtgctcaggtccacttttctgtctctgtaaggacactggtcattggatgtagggtctaccctaaatccaggatgatctcatgctgagatccttaacaacacctgcaaagactctatttccaaatcaggtcacattcatgggtaccaggggttaccacctggacaagccttttcgggggacacgatttgacccaagtccagctgtttgaagctgctaagtttggagtaatctgttgcacagccacaaggatcttaggtaagtcttggctagcagaaccaacagttcatcagccagcgttagcaggcaggaggggaggcagcatgcacggcacagggacaggcaggcgggcacagctgttggtggggtgtgcggaaggtctgcttgattttttcactgaagccgaaagcaaggtcatcagctgagtgaggatgagggaggttggaggccaacaagaaagtgacagaacagatcgcaagagagagagccccacggaaccatagtagaatggatgttggctgctcaggaggctgaggtgggaggatcacttgagcctgggagacagaagttgcagcgagcttagatcgagccactgctctccagcctgggcaatagagcaacactctgtctctaaaacataaacaagatggccaggcacgtggctcatatctataatcccagcactttgggaggctgaggagggcagatcatttgaggccaggagttcaagaccagccaggccaacatggtgaaaccctgtctctactaaaaatacaaaaatcagccaggcatagaggcatgtgcctgtagtcccagctactcagcaggctgaggcacaagaattgcttaaacctgggaggcagaggttgcaatgagctgagattgcaccaccgcactccagcctgggcaacagagtgagaccctgtctcaacacagaacaaaacatactgagaccccgtctctacaaaaaaatacaaatattactcaggcacagtggggcaaacctgaggtcccaactgcttgggaggccaagataggaggatcgcttgagcccaggaggttgaggctgcagtaagctgcagtgatcagccactgcactacagcctgggagacagagggagaccctctccatttaaaaaaaaaaaaagtgagccaagcgcagtggctcacgtctgtaatctcagcactttgggaggccaaggcgggctgatcacaaggtcaagagttcaagaccagcctggccaacatggtgaaaccccatctctactaagaatacaaaaattagctgggcgtgcatggtggcacgtgcctgtaatcccagctacttgggaggctgaggcaagagaatcacttgaacccgggaggcagaggttgcagtgagctgagatcacgccaatgcactccagcctgggtgacagagcaagactccatctcggggggaggcaaaaaaaaggctgggtgtggtggctcatgcctgtaatctcagcactttgggaagccgaggcgggtggatcacctgaggtcaggaatttgagaccagcctgaccaacatggtgaaagcctgtctctactaaaaaatacaaacaggccaggtacggtggctcacacctgtaagcccagcactttgggaggccgaggcaggagatcgagaccatccaccatcctggctaacacagtgaaaccccgtttctactaaaaatacaaaaaattagccgggcgtggcagcgtgcgcctgtagtcccagctactcgggaggctgaggcaggagaatggcgtgaacccgggaggcggagcttgcagtgagtggagatcgtgccactgcactccagcctgggcaacagagcgagactccatctcgaaaaaaaaaaaaaaacaaaaaaaaaatttagctgggcatgatggtgcatgcctgtaatcccagttacttgttaagctgaggcaggagaagtgcttgagcctggcaggcagaggttgcagtgagccgagatcacgccattgcactccagcctgggtaataagagtgaaattccatctcaacaaaaataataaaataaattaaaattaaaaacctataatcaaacatgtgacttccaggcaggtttctcaacctctgcactcatttggggccggatcattctctgttgtggggaccgagtgctggaggttatcttccagcatccctggcctcccccgactacctgactagatgccagctgcacacccccaccccccaccccatgacaagctaaactgatgccccggggcaggatccagcactccggtggagaacatggctcagtggatagtcggttcccgttgcgttttgcctcctgtcttctggttttggcctctctggctgcagaccaggagctctgcacctgagattctaccgctatgcctattttacagagaggtaagtgggctgtccccagccacacatggaagggctgcgggagccggcggaggaagccatgtctgggctctcagctggaccacagaaccccttccactgcacccacaacaggagctgggggaagacgggggtccgggaagggccaggctggagggctgtttccccagagcccacttggagggagctggctgggcagatctgaccaggtaaccgcacataaaacaggtgcaggcctgcctgtcgctggtggtggctcagtgtcagcagcaggacagatcctagagccaatggctgcggatacaaccgtctccccgcccagacgccacacactctcggggaacgttccctgaaagcccccacccctccctccctcccacgctcccctcacccaacacactcagaggagtcagtgcttggcaaaaataatttaatattccatctgggcagcgctctgaggtctgcttgtccctccctggcccctgtgccctacctgacccactcagggaccaccaccctgtccctacccaggcctcggggtgggggagtcagaggcccccagaccctgtgtcccattcctagtgaagctgaagccaccataacgtcagcctcttcccagagccccagctctgcccctggcttccctcgcgatcctcccctggctcccctcgcgatcctcccttggcttccctcgcgatcctcccctggcttccctcgcgatcctcccctggcttccctcgcgatcctcccctggcttccctcgcgatcctcccctggcttccctcgcaatcctcccctgtcctgagccgggcatcccagagcctcccgcagagtcccaccccaagcctggaaacttccacgctacagccctgcgccaggccccgaggagcagtcaggggactcagggagtcacagcacaacggcagctcctcggtcccagacggaggagggggacagcaaccatgcgcccagcaagacacaagcgatgacaccgatttacacacacccggtttagacgccaaagctctgcgggggaggagcggccctcaagagtcctccgggagctccgggtgagggtggggccctaggagggggccccgcgcagctgctccaggccgtccgcgtactggaaggcccgcccggtctcgtgctcatacatgtccagagccacctcgcagctctcacgcaccacgcgctctgggtcgtccgcgtgagcctgcagcgcggccaggcaggcgggccgggcaatggcgcccagggcctccgcgcactcgtgccgcaccatggggttctcggtgcatcgggccagggcggccgccagctggggcaccgccgcctcgtgctgcagctgtcccaggacgtagccgacctcgtggcggaagagggcgctcccacagtgcagacctgcaggggagagggacactcgctggggccaggaggggtgggaaggggagctctgtcttttcgaagacatggggtcttgctatcttgcccaggcaggtcacaaagtcctggcgatcttcccatcccggcctcccaaagtgctgggacgacaggcgtgagccaccacgcccaacctggggtgttctaccttgaagacacccctgcccccagccccagtgattagggatgcccgggggaactgaccgcagctatgggggcgggaaaagctgggagctatggggaccaagagggacgcttgcacgggttcttaagaggccccatgggaaatgcttggggccaggcccgggatgccgttcccgggggcaggccgcggccccactgcacagatgccatcactgaacctcacagcgaggcactgcccaggaccccaccccagaagcccctcctcaccctcggccagcgccagggcggcctcctcgcctcccgcgttgcgcagggcgaacatggcgcggtatcgctcgaagagcggccgggactcatccagcagcgcctcccgcaggcgccccacgtcacgctcctcagccggcggggcagggtccacggagaggtagggtcccgccgccggctccccgccgtgctgctgcagccactccagcctgcgcacggccagctggcaggtctcggccacctgcggggagggggtatcaggcagcgggttggccctggggggtcgcaggggcccttccccaccccccgggatggcagcttagcaggggagagagacactggcagggtgactaacccatcattccaggcaggaagtaagccagcaggggtggctgacttgtgagtgaccgggggactggagggctggggagggcctcagggaggaggtgatgtggaggcagagacctaagccagcttagggagggaatcaggtggagacccggggatggggaagcagcggtggaaaggccctgaggcaggaccctgcgggaggggtgagggccaaaggaacatgtgcggccccacctgaccaggtaaggcctgcgggccactgtaagggcttgggattttgtcctaaaggtgatgagatatcgtgagagctttaagcatggaacagaacagcagaattgagtgtcacacgtacccccggctgccccggaggaggagagactgagggtcggggtgggatgtggacaagaagtggcaggggagaaaggaacatgcatgtccgtggcggcataactcataacagctaaaaagcagagacaattcaagcatccagccacagtgagtggacacagcatgggccgtccacaccacggaacgtgactcagccacaaaaaggaatgacgggccggccgaagcggctcatgcccctaatcccagcagttagggagaccaaggcaggaggatcgcttgagcccaggagttcaacaccagcctgggcgacagagcgggacttcatctctataaagaaaaaactaataaaataaaaatttgtttcatttttgggccaggcgcggtggctcacgcctgtaatcccagcactttggaggccaaggcgggtggatcacgaggtcaggagatcgagaccatcctggctaacatggtgaaaccccgtctctactaaaaatacgaaaagatttgctgagcgtggtggcaggcgcctgtagtcccagctactctggaggctgaggcaggagaatagcatgaacctgggaagcagagcttgcagtgagccgagatcgcgcccactgcactccagcctgggcgacagagcgagacaccgtctcaaaaaaaaaaaagaagaaatgttggaaggtagcaggagatctctgaagaggtctggtgggccaggacaaggtatcagaggtagagggcactgggtgggttcagaggggtcttggcagagggactggacgtgggggttcagagaaagggggtcaggccggctcaggggctcaaggcccgggatggaagcgggtgagcaaagctggttgtcgccgttttgccaaatggggcgcagcaagtgtctgtccagattgtcgccctcgccttcctcatccctggggcatccttggccaagtggtcgccctggcaaccagagatggggagggtctgaggctgctccaggtcagggctggggcagggctgggcagggcttcccagggacccgagactggcagggagacaagcaggggcctggttacctcgatgacggggtccgaggaatactgcttcaggatctccagaacttccgggtccccgatggcccccagggcctcccctgggaagaagcagccggagagctcatgttggtggggtggatgtgtggaaaatgcccggctacctctgggaccggaggacacccctcccagggctctgccactgtggggaagccccgcctctgtccacggctgattggagcagcagtcggtacaggctccccgctggaccaatcagcatcccctccccagagcaaggcactgcctggaaccgcacctggctgccgctcagagcaaaatggaccccatcccggcccgtaccatgagacagggagacaagtatatccctacaactcgggatcacagctgacaagcagctccaagaacccaggaggtcgggggtgcagtgagctatgatcacaccactgtactccagcatgggcgacagagtgagaccctgtctcaaaaaaacaaacaaaaaaaattcccaaaacaggccgggcctgccggctggagactccagaatttggggccactggggctacacttaggtgggttcgggtacaggcgcaagtgcaggcgtcgcaagcccaggtcggagcaaggctggcggcggctccccgtagagccctgggtgcagatgttccttgaattttctcagaatcgagctcaagggccctgcctgtgaggcagctgagctggtggcttttgcctttcctgaaggttgcggtttgcgtttgtgcacctgcctggcaggctccctctgccgggaaaagtcccgtatgcgccaacacaggctctgtgtcaggcacctcccacgcgctaattgcaaatgagctcactggttacagaaacacagtcccagtggcacagacgcaccaactacctgcctcactggtctccttcgctgtctaggtccctcgctacaacagtccattttttttttttttttagagcttcgctcttgtgacccaggctagagtacaatggcgcgatctccactcactgaaaactccgcctcctgggttcaagtgattctcctgcctcagcctcccaaagtagctgggattacaggcgccggccaccacgcccagctacttttttttgtatttttagttgagacggggtttcaccatgttggccaggctagtcttgaactcctgacctcaggtgatccacccgcctcagcctcccaaagtgctgggattacaggcgtgagccaatgcacccgacctgaacagtccatttttttgagacagggtctcactctgttgcccaagctggagtgcagtggcatgatcatggctaactgcagcctcaacctccctggctcaagtaatcctcctgcctcagcctcctgagtagttgggaccacacgcgtgagccacgatgcccggcttgtatctgtattgtcactgttttgtctcttactacatgacagagcctggcatacagtaggtgctcactaaatgtgtgtccaatgagtggagtaaatctaatatacattagggattggggatctatggcttgtcgcttgtttttatacgagcaaagaatggtttttaaaacacttttaagggtttaaggcggggtgcgatggctcatgcctgtaatcccagcactttgggaggccgaggcaggtggatcacttgaggccaggagttcaaggccagcctggccaacatggcaaaacccatctctactaaaaatacaaaaattacccaggcgtggtggcacacacctgtaacgctatctacttgggaggctaaggcaggagaatcacttgaacccgggaggcagaggttgcagtgagccaagacggcaccacagtaccccagcctgggcgacagagtgagactctgactcaaaacaaacaaataaatggtttaaaacaaaaaatcaaagggatagtacttcctgatgggtggaatttatatgaaattcaaatctcagcatttacaaatgaagtttgttttttgttttttcacagacaggatctcactctgttgcccaggctggagtgcggtggcacgatcatggctcactgcaaccttgacttcccgggctccagcgattctcccgcctcagcctcccaagtggctgcgactacaggtgcatgccaccatgcctggctaatttttgtattttttctagagacagggttttgccatgttgcccaggatggtcttgaactcctgagttcaaacgatccaccttcctgggcctcccaaagtgctaagattacaggcctgagccaccgccccctgcccagttgaggttgtctgggcacacagccttagccatttggtgacagatgacctgcgctggctttattgagtcgctgtctggctgcagagctgcaggtatttactatctggtgctctatggggcagttgaccactctgatatttatcacctgagtgaggaaggggacacgtggggtcatgaagaagtgaggcaggagggagcaggtgcccgggacacagacaggtgctcacctgcctcatggcgcaccatgggctcctgacgggtgtcttgcagcacgtccaccagcatggggatggcgcgggcatcctgcatctggcccaggcagtaggccagctcgtgcttgagcagggcggaatcgtcatcgaaggcctggctgatccatgcaatggcgcctgggccgccgagcccacgcagcgtgaacagcgcccggaagcgggcctgcaggggctgcttggggtccaccagcgtctgcccgatggcatccacctcctgctccgtcaccatcgtgctgtcaatgggtcccggccttccacaaccctgctcaggctaaacctggggacgcggggatgtaagaacctgtggcagaaaaatgagagcccaggttagaagcccccttcaccagtgcgttgtctgttcctaggacctgggtggggcaaattcctacccactgaccaacctgagcatctacgctgaaagctcagctccaacctccctactagctgtgcagccttccgtaagttgctttccctctctgggcctcagtctctgcactgcctctcgcctataggcctatcagaaatgacctccactgtctgctctccacacagcagccagagggacagctgacccccaaaatggccctagcgatccccacccaatattcaaggctttatatagcgatccccacccaatattcaaggctttatatagtcctctcccactctgaacagggctgacccatgtgaatgccaagaagatggaacagagcaagacttccaaggttagggcataaaaagcacaacagtctcatccttgttctctctctaggggaagccagtgaccatgttgtgaggatgctcaagcagtcttttgtaggggcccacgtggcaaaaaactgagccctcccaccaacagccatgtgagagaagtgggctggcagcagctcgtccagccccaagcgaaccttcagatgatgcagccccagagcgtctccactgaggccttaccagaggccagacccagagccagccagctaagccaggcccagagcaactgtgtgcgacactgtttactgttgttgaaggtaaccaagtatgtttttttgtttgtttttgagacaggatcttgttctgtcgccaggctggagtacggcagcatgatcacggctcactgtagcctcgaactcccagtctcaagtgatcctcctgcctcagacttcctagtggctgtgtctacaggcacacaccagcatgcccagctaattttttttttattatttgtagagatggggtctcacttctatgttgcccaggctggtctccaactcccaagctcaagtgatcatcctgcctcagcctcccaaagcattaggattacaggcatcagccactacccccagccattatggggatttttgttacacagcttagataacagattcagaagtactttcaatatgtaaactggaccatatcactcccttgcttaaaatcctcctatgcctcctcactcaactacttgacagtcccaaaggcccttcatgaccatctcccatcacctcttccctctctagctccactccagccacacaggcctcctcgctgttcctccaacacgccaggcccagtgcagccctagggcctttgcatttgctgtgatctccatgaggaacattcttccctagatgtccccacgtagcaggccaggcctcactaacacaggcctccataactgtttcagcactgactgagtggttaagttaaacattaaaagctaaaagagccagtgccctcatacaaaggctggaatgtaacaaaagcccatgaagagttttgcccaggcctttcctgggccttaaggcatgacaagataatgaaggaatttttttttttttgagacagagtttcgctcttttgcccaggctggagtgtagtggcattatctcggctcaccacaacctatgcttccagggttcaagtgattctcctgcctcagcctcccgagtatctgggattataggcatgcaccaccatgcccggctaattttgtatttttagtagagacagggtttctccatgttggtcaggctggtctcgaactcccaacctcaggtgatccacccgcctcagcctcccaaactgctggaattacaggcttgagccaccacacccagccaataacgaaggaattcttaatgtgacccgtttaggatgaaacaagttttactgggtgtctgaagaactccccaaacctccatgatttagcaggagacaagataaggatgatcaccccagcacctggacccactggagatgagataagggtgatcaccccagcacctggacccatttagattaagtaaatttactgaggttccaaaggaaagtcttcaggattcagatcttagttatagattaaaagaagttagtcactttaagtctttagatggatgctcagttacatgtagatggagagcttagagggtatataagctctggaaaactttgtcattttgagttggtctggcgatattttccaggccttctccctgtaaccggttacagaaataaaaactctcttcctccccagttaatctgcatctcgttattggaccatgagaaatagcagcccgaccctcagtttggtccaggaacacccgtgctcatcctcttgctttcctgggtctccaacatcacttcctcatggaagccttccctgatcacaatggacaatgttactcttccatctcttttcacttattcagctttatttttctccacggcgcctaagactcctagatatcatattggaaagtattggtttagttgcttgtgattggtcttatccctcattagaatagaactctgaaggctgggactgagtctatcttggtcactgttgtattcccagcacttagtgcaatgacctgcacgcagtagggcctcaataaaaacaataaccggctgggcgcggtggctcacgcctgtaatcccagcgctttgggaggccgaggtggacagaccatctgagttcaggagttcgagaccagctgaccaacatggtgaaaccccatctctactaaaaatacaaaaattagctgggcgtggtggtgggcgcctgtaatcccagctactcgggaggctgaggtaggagaatcgcctgaactcgagaggcggaggttgcagtgagccgagatcgtgccattgcattccagactgagctacaaagcaagaccctgtctcaaaataaataaataaaataaaaacgacaaccgtgacaatagcagctgacacttatgtagcatttgctacgcgccaggcactccatgctctttacattcattaattcattcgatctacatcactaccctgtgaggtagttactaagattgtccccattttacaggtgaggaaactgaggcacagtttgggactgtgcttgggaacttgcttgggagcagcgtgaagagttaggaatccaggaagtctggctccagagtcgggctctaaaccaccaacgctttgttgaatgacttaggataaaagaacacagccaaggggagaagggacccctctctttccagatcggctgagaacctggcggatgcttcatctcaagacaggctggctatggcatgctggcagccctctctggtgaacagtggcgtcagcaaggctgcctgggcttgacgagggcagtgtagccacctaagcacaggtgaccatcaaaggagagtgacacctttaaagaggggtcatcagaaaccagagggcaggcctgtgcgagctggcagggcactggggaccattgagacccaaccgtacgacataggagcttcaggacgtgaggtgggcactctttcatgtaaaaaatcccagaggaaagagatcgccgggactcgagaccccttaacccgccccatccacagtcaacgaatccctgagaccggattccctaacgaggcgctcccggtgccaccgcccgccagacccgggccccacaccgtgatcgccgcctccgggacgcctcaccgagctctggagactcaggacccgtcggcccggccagtaaccgcaggcgcctctgccaccaccgcttcacctgccgcgacgcccgcagtgcggtctgggggccgccattttctcgcccacgtgaccgtgccggacggcaccaacgcagccgcgggtgagacctagtgagaggctccgtgcatgagggaggcccggaaggctgagtcggtgctggtgccacagctcatgcaaacgcaggaacagtattcctagtgcgttcttcggggaaggggacgggcaacgtatgccctttcatgggaaaaaattctctccaacctccccactgcggtacaagaagtgagactggtttgtgccgattcagcgccctgcctgggctggctagcaacggagcatgcgcagtgtttctaggcgtggtcagactccagaggtgttggccaatgggctcagggagctcgaaccttaagtaggtgaggaataaaaaaaggaagaaatgcagtcgttcattcattcatgtatgtaataaatagtacatggccttgaggacaagagagccttcagcccttaccctcgtacgcctcccagtgttgttatagagacagaaaataacacgataagtaaatgcaatacctattagatggtgaaaaaggctaacgagaaaaaattcggtagccaagggcggtgtatgtatagggtgtgcagtttcaggaagggtggccagaatctgaggtggtgacatctgaagaaagacctgaaagaggccgggtacggtggctcacaccggtaatcccaacactttgggaggccgaggtgggtgttatcacttgaggtcaggagttcgagaccagcctggccaacatggtgaaacccccatctctactaaaaatacaaaaaggcttcagcttcccgagtagctgggattacaggcatgcaacaccacaccagctaactttttgtatttttagtagagacagggtttcactatgttggccaggctggtctcaaactcctgacctcaggtgatccacctgccttggcctcccaaagtgctgggattacaggcgtgagctactgtgccctgcttgcaatctcttatttttaaaatgtgggtgactgccaggagtggtggctcatacctgtaatcctggcactttgggaggctgtggggtgagaggatgatcgattgagcccaagattccaagaccagcctgggcaatgtggtaagcccccgtctcaacagaaaaaaaattttttttaatttggctgggcgcagtggctcagcctgtaatcccagctacttgggtggctgaggcaggagaatcgcttgagcctgggagacacaggttacagtgagttgagatcctgtcactgcactccagcctgggcaacagagcaagactccatttccaaaaaaaaaaaaaaaaaatcaactgtgcctggtggctcatgcctgtaggcccagctactcaggtggcttgatagcttgagtccaggagttcaaggatccagtgagctgtaatcacaccactggattccagcctgggtgacagagcaagaccccatctcaaaaaaaaaaaaaaaatgagcaattaataaaaaaacatggctgggcattgtagctcacgcctgtaattccagcactttgggaggccaaggcaggtggatcacttgtggtcaggagttcaagaccagcatggccaacatgctgaaaccccatctctactaaaaatactaaaattagcttggcctagtggcgggtgcctgtaattccagctactcaggagtctgaggcaggagcatcacttgaacccaggagacggaagttgcagtgagccaagatcgcgtcactgcactccagcttgggtgacagagtgagactccatctcaaaaaaataattaaataaaaattaatgaaaaaacataaaatgctgtgcatagcaaagaaatccttttggaaggccaacttctattttaagacaacattcacaaatacttattgagcaactactgtgtgctggacagtgtcctgagcacagaggatagtgtcctgggcacagaggacacaggacaaaacagacacagtgtctggcctcatggagctgacacccccacttttatttttttgagacagagtctcgctctgtcacccaggctggagtgcaatggggcgatctcagctcactgcaagctccgcctcctgggttcacgccattctcctgcctcagcctcccaagtagctgggacgacaggtgcccaccaccaagcccagctaatttttttgtatttttagtagagacggggtttcaccgtgttagccaggatggtctcgatctcctgacctcgtgatccgcccgcctcggcctcccaaagtgctgggattacaggcgtgagccaccgtgcacggcccaccccccctttttttttttaaattattgtattgccttcctatgtgttggaaaactgactgcagataacaggcatcactgcagccctcagctgccttgcgaggacgtcatctcaacatgtttgtggctcaggctgtttacggaggacttcccgtggaccaggagctgtgctgactcaggaaggctacgagggcagggtgccaggtgtgactggccccaaggatgctccccaggaggagataatcccagggtgcaggacgcagatatcgaagcctcagccaaaagcaaggcctgtgtaagtcagagaacttggcatctggcctctgtagaccttcgagaaactgatagcacagaagaaccaagtctgcgtcttctgttcggtgggtcctctgggattgagcaagtccctggggggcggaagtctggaatccaggtatctgcagatctgtggcctctctggaggctccaggggaggatccttcctgcctcttccagcttctgggggtggccgccagtccttggtgtttctcagcttgtggcttcgtcactccaatctctgccactgtcatcacctggccttgacccctgtgtgtctgtctctgtgtttctgtgttagaatctccctctcctctccttttattttattcttctgagacagagtcttgctgtgttgcccaggctggagtgcagtggcgcgatctcagctcaccgcaacctctgcctcccgggttccaacgattctcctccctcagcctcccgagtagctgggaatacaggggcctgctaccatgcccggctaatttttgtatttttagtagagatgaggtttcaccatgttggccaggctggtcttgaaggcctgacctcaagtaatctgcccacctcggcctaccaaagtgccgggattacagccgttagtcactgcgcccagctcctctttcagatctttattaaaacatcatctttgcaataagagcatccccgagcactgcatctgaaactgtaacctcttgcctcctccttttccctgttctcttttctccttaactcagctccaaaggggatttttttttttttttctggagtgcagtggtgcaatctcggttcacttcaaccaccgcctcccgggttcaagggattctcctgcctcagcctcccgagaagctgggattacaggcgcgtgctaccacgctcagctaatttttgtatttttagtagagatgaggtttcgccatgttgaccaggatggtctcgatctcttgacttcataatccgccctccttggcctcccaaagcactgggattataggcgcaagccactgcgccgggcaagaactttttaaataacagctgtattgagatatagtttacatactgtacaattcatctgtgtaaagtgataattcagtggtgtttagtatattcagagtcgggcagccatcatcacataaattttttttttttttttccgagacggagtcttgctttgacacccaaggtggagtgtggtggcatgatctgggctcactgcaacctacacttcccgggttcaagtgattcccctgcttcagcctcccgagtagctgggactacaggtgcgcgccagcacacccggctcatttttgtatttttagtagagatggggtttcaccagattggccaggctgatcttgaactcctgacctcaagtgatctgcccgcctcagcctcccaaagtgctgggattacaggtgtgagccacagctcacggccatcacatcaattttagaacatatccatcaaccccccaaaataaagtccattccagtcactcctgatccccctctcccagcccttggcaaccactaatccacttcctgtctctatggatttgcttatctggacatttcgtatcaatggaatcactcactatgtggtcttttgtatctggcttctttcactgggcatgatgctttcgaggttcatccaatctgtagcctgtgtccgagcctcattgcctcatattgcaaaacaccgtgtcattgtatgaatggagcattttcccttcatctgtggatgtacatttgggttgtgtgcactttgtggatgttatgaataaagctgctatgcacataggtgtgtgagtttttgcgtggatgttacatgtttgtttctcttgggtagatacctaggagtgttactgctgtgtcatgtggcaattctatgtttaacctttttttttttttttttttttttgagactgagtcttgccctgttgcctaggctggagtacaatggtgcgatcttggctcactgcaacctttgcctcccgggttcaagcaattctcctgcctcagtctccccagtagctgggattacaggcgcctgccacgatgcttggctaatttttcgtatttttagtagagacggggtttcactatgttggccaggctggtctcgaactcctgacctcaggtgatccacccacctccacctcccaaagtgctgtgattacaggcgtgagccaccgcgcccggcccataatttttttaaaaacctgttttttgttttttttttcaagacgtagtgttgctctgtcaccctggctgaagtgcagtggcgcaatctcggctcattgcaacctctgcctcctgggttcaagggattcttctgcctcaacctcccgagtagctgggattaactccgtacctcaggtgatccgcccgcctcggcctcccaaagtgccgggattacaggcttgagccaccgcacctggcctaaaaacctgttttgttccctgctgtctcactggggcctggaggagcagcacttaggagcgcaatgcaggtttgttgaataaattaatgactctcagcagtgacgtttgtacgttcgggacacgcacctggtgttgggtcccatctgcgctcattaggcgcgacgtcaatgccgcactgaggtgtgcctggcttcgatctaccctaggaagggtctgccctggggcgccccattccgcgactgtccccagtgggaaccacgccctccatctaccagagccatttctgcaacgtctagcaccccgcgggtcctcttccggccgcggttgccctgggcaacgcgtggagccgcgcttcctgtattgatttgaatcgcgggagacgtcacgtcctcccgagatgcccaacgcgcgcaggcgcagccactcggagtgggcagggcctggctgggtgttgggcagggcctggcggtgtgtggggtaggcggggggcgtggccgcgattagccgcgcgcggcgtgggggcgtggtcgggttgcgggggtgcgcgcggccggccgggcgcgcgcggcggagggagggagccgggaggcagcggaggagcgaccgccgccatattagggaccgcggagcccgggatcccgtcagcggcggccgcggccgggcctgcgggagctgcggaggccggaggcgggcgctgtgcggtgccaggagaggcggggtcggcgggagccagcgagccacgggagcgagccaggtgaggcggccggggtcggggacccgccccccgggccctaggcggcggagcttgactgcgaccccccaaaaccgggacggcggggcgggctgcgacccccaccccagctcaggcccctccaggagcccccagtcccctcgaatgccgcctcccaggccgaactaggcccgggtgacctcagcatccgcgtctcccgagttaacacccaaatcccagcgtcccccccacgtcggggcctgccgtgacccccaccccgagccacctgtaagtcgtgacctccccgcagccgccgtcagcgtccaccattctttttaaaataggctgagccctgcacccccaaccaggggaccccactgcgcacccctagaacagcagaccccgcctcctaacccgggtgatttctccctggcctgtcatccccgggacttcccagttcagaccctcccagcttgggtcctgcccacacgaagccgccccccatcgctgagcctgtggtgtgcgatggctcgcccaggccgcaaccagcccctcgccccagtaaaatgcagtcccagcccgggacacccggaaacctgtgtctgtggtcactgttgtgtccaccagtccccgcaggcacgggttgagtgcatggatgtccccgtctcacctcatctcgctgatttctgctcccccaccctcccagcgtgccccctaccagcccccattcccccgaaatccagctctcccaccaaagcctcagacgagctatccgtgcacaagcccctccctcctccgaactgaacctccgtcctgcgtcctgccccgtgtcttctccaaacgcaagcctggccatctcggatccccagaatatggagtgtgccccccattcagagccgttttacccctactcaaacctgtgacaccccctccccctcttccaccgtccagacctgtctccaccccacgtcctgagacccccgatatgcagatgttcagcctaaatctgttttgtcttttcccctgttttctccaccccaaactcatcctctggttcagggcgtctctctggttccgattcccccgccccgccccagtctaccgggcgatgacctcatgcctctccgtggtgaggcccccaccccaacctatgtgctttgaaggagggtgatttacctaagggaaaaccatccaccaaggacacacaccaccagcatgagggcagcctgcggggactttgaagtgaaggcggagtggtctctctcggggtgggggtggggatagaagctgacggcatcacctaggtttggtccccggagtggatgtgtcgggggccgtctgtcatgcggaattccgcgtgggcctcctcctgtgtcaggggcccgtgtgttttggcgacacccgattgtcatttccttcggaatcccaagtggaggcaggtgtgctggccactggccgctgcccggcgccttgagcagcgagcggagttgggttgcagagggttttgctaagggagcagacacttactcaaaggcaagcccggtgctttactggggaggggtatcttggcaaggtggtacccgccagtttgcccctgtgacttgcttcccaggtcaaatttcagaacctgtgccctggctgcaggcagtggtgggggtaggggttggggtggggctttggggtttggaggaggagtttctagaaacagacaagccggattggtcttcaaggtggggctacattgattttctttttttttttttttttttttgagatggagtttcgctctgggctgaagtccagtggcgcgatctcggctcaccgcaacctctgcctcccaggttcaagtgattctcctgcctcagcctcctgagtagctgggattacaggtgtgcgcaccacgcccggctatttttgtattttaagtagagacaggttttcaccatgttggccaggctggtctccaactcctgacctcaggcgatctgcccgcctcgaggcctcccaaagtgctgtgattacaggcgtgcgccaccgcgctcggccttacgttgattttcaaaccacttactgtttaatggggtttctggtagaggggttttgtagactgagaacttctgggtttgggagtcccagaatggaattggttctgaggaccttttgcttggtgtcatttagaggggagaggatggaaagtctgtgtgtgtagggccgctcccggggactccaggcagaggtgaagatccaggggcttggtcttctaggaactcagcgctgtcactcctttctcctggcgcaaagctctccactgcccaattctgtccccaggggacatttggcagtatttgagccaggcatgctgctcagtgcccccactgtgcccagaacggcccagtacagaaagcagcctgtccccaatgtctggactgtgagccccgtgagggcagtgagtgtgcctgcctggtccccgctccgcctccggcctgctcagtgccctgggctgtgtgcttgcccacagcgggccccctgttggcactgccacagggacctgggcacctaccagcaggaaagggagtgtttgacctcatctctcttctgcccccgacacctccctgtggtcaccagtgacctgctcgtcaactccgcttgtcactgccttgcccacatgtcactgttcttcccagccactggactcagcacagagccagagccccttcctgggccacttatgttctcgtccagggacgttcatgtccccagtggccccaggtccctgtgtgcgttggcaggtgactgccttcctctgcctcagtgtcctcattcatggatgggatgaggggcacacaagcagcctgcctggccgcgcctcattcagtcactcagccgccactgaccacgaatgacacaccgcccccacaacggtgaacacccccactctctcttggcttcctactccgtctggttcttccttcaggcttcttcactggcccttctttctttatttaatttttgctcgtagtagctttatttggatacacttctcctgccgcacgattcactgctttagagcgtgcagttccctggtttttatatgttcacaggctcgggccgccatcacctctgcccaattctggagcattctcattccctcaggaagaaaccagccttgaccccatcagccgccaccacctgtctcccctgcctctgtggctgggcctgtcccggacatttcatagaaatggaatcccacattgtgtggccttttgtgtctggcatctctcactgagtgtgatgtcctcaaggtgcgtctaggctgtggcctgagtcagagccctgctctttgtcgtggctgagtcatgttccgtgatgtggaggcaccgggttttgtgcgtctccttattcagtggacgttggtgctgtttccagtgtctgcctgttgtgagttgagctgctgcgaagaggcaggcgctggtggttgtgtggcgaccgtccttgttgctctgtgactgaggcgctggtgcctccactcgccggctgatcgtgtctgatggtgtcaaccccatgcaaccaccgtgagcccagctctagagacctgccttccaacctttccaccttgtcctcctgcccccagcatgtcccttccaccccagccttcccaaattgctgcacggttctgatttttttcttttttctttttcctttttgagatggagtctcactttgttacctaggctggagtgcagtggcgcaatcacaactcactgcagcctcgaccttccagcctcaggtaatctgcccacctcagtctcccgagtagctgggactccaggcgcgccaccatacctggctaatgtttgtattttctgtagagacggggttttaccatgttgctcaggctggccttgaagtcctgggctcaagtgatcctcctgccctggcctcccaaagctctgggattactggcggagccagcatgcccggccacactgctgggttctggagagcggcaggccgttcagattcctgtgctgttttgcacacattcccttctgttgtgaatcttcctctctcccagatcagatttggcctgggaacctctatattctcatccccaccagcctgcaggccactgggtcggtggtggaaggatgatgggagcagagagagggtgggcagtgggcatctgtctgctttcaccggagggctgaggagtgtgggaggccagtgctggtctgtttgccctggagagcaactcttccacttaaggatccccctcaggatccccctcatccatgcattccccacctgggtgactccgcccccacaggcactgggcaacacctcgggacatctgtgcattgtcacaactggggggcgctcctggcatggagtgagtggaggccagtgatgctgctcagcgccccgcagagcccaggactccccgccatagacagcgttccggcccaaatgtccgcagcgctgaggttggggccctcgccatgaactccccggactgggtttctattgctaccgcctcacctcgcctgggacccgtgggtgggagctgcatgacacagacagagatgcagagatgtgcgggcctcgggaacctgatggcgctccatccgatcctgagagaccacaggcgtggtgccacgctgccttcctcctcacgtggggcactgcagccttttgtgctgccgcagacccaggtgtcttttaggtctgaaggtgtcatcaagtcagacagggctgtgggtactcggtggtaccaggaggctggagatgagcaacctcgggtcttttatctgcaggcaccatttggaagtgtggagagcagttctcacgggagtgggctggaggtgggagctgccccccacacagggaagagggtgagagctgctggccgagtagaccctggggatgcttctcatccactctagactgctattcactctagactgcctgccggctgggtacagaggctcacgcctggaatcgcagcactttgggaggcctcagcaggaggattgcttgagcccaggagtttgaaaccagcccgggcaacatagggagaccctgacccccatctctatattttaaaaacaagaagagaaaaataggctgcacacccagtgggggcagcagcttggctctgctttgcggcgcctgggtcagcacctagaacccacatggcacatggctggttggtggggaggcgtcggctggcaggtggcggcgtgagtaaatgaatgaatgacgtgcacggggtgtattcccggggcccaggcaccggcctccaacagtaactcgcctcgccatggctcacacgggcaccctggaaggcacgctgtcccctgccaagggtctgggccccacccttttttacttggctactcttggctgtgtctttgcgtttgtagaggtcagaggccgccagctcagcttgttcttctgcaggtgggggttgctccctgcagagatctctgtgcctcagtggtctctccgctaggccccggctctggttctggtccagagtccacctctcccctgtgtcagtccacccctgcaaccacggccacctgccccgggagccccatttctctgacgtcctccctcctctctgagactgatgggggcagcatgggaggagataagtgtcatggtctgtggacaggaggtcactggggcagcatcctggctgccaaggcaccgccatgcccaaggacgaaggagcagggagcagtctggggacctgcgtacccctgtcatgagtcccgggcccagccagcatccactgagcacctctggggccgtgtgtgcacctgtcatgagtcctgggcccagccagctctcaccaagcatcttctctgggtcatgccgggtgcctgctgcctcgtagacctcatgcctgatttcacagcttcctaggcaggcagtgttgtccctgcttaactgatgaagaaactgatgtcccaagaggtgaagctgcccaaagcttcgtggccaggaagggttgaagctgggactcagcctgggctgatcccgtcgaaagcccacactctttctgatggaccctgctagaaccttttcatgggacttggtttactttcatgggagggcacaaggagggttagcgataagggtgtctgggtgcttcgcccgccttgggtccctggagctgcagggctgagggccgcgtgtgctgggtggggtggtgctggtggggggctcacgtgctctgacaaggccatctatgcagctggcacggctgcccccttaatcacatcatgacaccgaggacatccaaatgtgacccgagagagccatctagagtcctcctctgaggagtggctgggaatgagattagtgggatgaggtgacgcttgtgaagccgtgcttcataaatgacactcctgggcgcagggcaggaggcaaacctccccagaaactcccagatccagtgagagcagacagcggatagctgggtgaccccccatttttttgtggggggtctttcttatctggtgcttctccctagccccgcagaggatggctggacatcacgcccaggcacccagcgcagtcccttgcctttcacatgaggagggggctctctgggagggcacctgggccagggcctcacaggtggtctggggacacctgggacccctcaggcaggagcactttgcaactttgcaggggttgggacctgtgagggctgttagccagcccaccccctggctctgtcaccgccatccagcaactttgcaggggtcgggacctgtgaggggctgtgtcccggcccacccccgagctctgtcaccaccatccagtgatccttagtcggaggcctcctgctggaaccactctgcggagactccagcaggaggcagtgccttgcagcttccccgtgggcagggctgggccgagtgctgagtctaggacacttcgcctcctggggcaagggccagggagtgggcacagagccagacccagactggctggattcacgtcccagctctaccctcaccaactgcatggggaccttgagcagagggtgctgtcccaggccccaagatgcaatggcgcctgcccacctgctgtcccaaggacattcagtcaagcacactgagtgcttccagctgtgccagctggtaggcacgggcaaggtttgcctctgtcctagccccatgtgtgttctgatgctctgcccctgggccaggagcccgcacgggatgtggcggcacccatgaggctctggtcggtgttccctcctcccttacctgctccacgtcccctgtgggtagcaagtgccgcctcacctgcaggctggagttacccttacccaaggcggtcctgccccagtgtccactgggccagggtggggggatgccctggtgtataccataggtggcacatccagaccatagtcagcctcaacacatgagtcataaaagatccgtcattgggatgtttcaattccttttgtccgttaaagagcctgaaaaaaatatgaaaacagtggggaccagttttcccagccaagcaaggcgttgcaggagtaggagcttggctgagcctccaggaaccagagtgctgtgttcctgaggaagatcccgcaccaggggagaccttgggggctttgcattggtgctgttcccaggccctgtctacacggcagacagcccctcacgctttgcgtccccactcagggacacctcaaagtcgagcctggagacaaatcgtgccgtgccattggcccccacaaacagtgcctcatcggctccctttcctcctctccccactggtgcagtggggatggggctggggatgcctggccacactctgcaggtctcgctcattcaagtcacttccctggttttgcccgagagcagggtctctgcccttgcaccctgtggacattggggccggatcgttctctggggtgcggccgtcctgggcactacagggtgctgagcagcgtccctggcctccacccactccacgccaggggcacccccagtcatgacaaccacagatgtccccagacatcaccatatatcataccctgggggcagaatcaccctggttaagaccccctgggttatgggattccatggacccccaagagactctgcgtcccatgatcctctgccctgctgaggtcccaggaggctgcacacattgaaatccataccctgagtgggagggagagaggaggtgaatctcaggagctggagtccccctggtttgtgctgtctgccccatcggaggcttattctggtgtctggtgtgagcaggggccgactccatttttttccacatatttatcccagggcgtctccctctgtacgggggccctgtcactgttttgtcaggtgactgggtcatgcccatttcccaggggaacaggaagaagctcgagactgaaggcttgcccggggcagtggcagaaggaggcctcctggctcttcattctggggcccagggggtgaaaggtggaccttccctatgagctggcccagggggtttgcaggacccacagggcagtgccctgccaaggggatggggcagcaggaagcccggtggcccagggcccgggtccaccacccagaccagggcaaccaagctgcaggtgtcggccacacaggcagagccacagcagcatccccactaggcacccccgggccagggacaagaacctctgcagggcctggcggagcacgagtcactcactgattcactgctgatgtgcagcgagggtccgggttgctgctaaactccctcgacccggtctgagcctttccacacggccacacacgttgtctgtgctcaggaattacttaacagcagcttaagatcctgatttctctctactctaaccttttacgatgaaaccttccgagcatccagcaaaggagggagaatgcggtggtgcccggtctcatccggagcctgcctggcccatctctgaccgtggtttgtttttttgaatacctcacagttcacgtgatacagaattctagaagtacaggccgggcgcggtggctcacgcttgtaatcccagcactttgggaggccgaggcgggcggatcacaaggtcaggagatcgaaaccatcctggctaatactgtgaaaccccgtctctactaaaaatacaaaaaattaggcactacagtggcgggcccctgtagtcccagctactcgggaggctgaggcaggagaatggtgtgaaccaggaggcggagcttgcagtgagcagagatcgcaccactgcagtccagcctgggtgacagagccagactccgtctctaaaaaaaaaaaaaaaaggaattcaagaagtacaaaacgaggtgccaggagaaataaggcttctttcctccccaatcctcgtcctctccttcctctccccacccaccccatgaccagccgcttttcgaaccttctgggagcagtgtgctctgcatggccatttttctgtgcagtgggtctcacagcctcttccgctccctgtctgatggcctcttgcgtcttccactctgactagctgccgcagtgactccatctctgcacacatgcatgctgagtttctaaggataaattcttagaagtagaaataccgcatcacagaggatgtgcattttttaaattttggaagcagttgccaaattgccttcctttgaagccgtagcagtttgcagcttctgccaaccatgagtgcgtgtggctgtctctccccacgcctgggatggtgaggccgagtcccccagcccacagcctcccccaccgtctgacgggcgggagggtggtgtcctcggttggattggcagctcctgactgcgagggaggactggtcctttcccagtgcggtttgttggtgtcctttgctactttgggctctcctgtgggtggcaggtgcttccctcagtttgtcatctgttttttaactgtgttggtggtgtgtctgccctgcggactcccaattttcccggtgttgaattccacagccatgcctcttatggctcctggattttgttcttcctgcagcgcagctgagcgaggggcttagaggggtcgctgggggtcccggagctgagctgagcaccgctagcagcaccgggcaagtgtccaggtgaggtgccccgggaggccccaggcccgggatacaggaccctccagatctcggaggtgggaagacagtctgcacacccgtcttgtgcacccctgccctcactgcagggacagacaggagctgggtctcaggctgctgggcaggcctgggccctgtggttttgcccaccagccttgggcagcgttgagtgagttgtgtggccagtagactgacagctgctgcccacctggcaacgtttgggccattggctcacggcgtctctgttgccccggagggcttgtcaggtgcagccatgtgctgctgggcagcgatgtgtgccaggggccgtgtgcagctgcagctggcgcccggtgtatttgctttcagtgctgacttcagggcagcatcagtgttctggggaagtgggggatgatattttagccaatcacaaccagactctgccagcaagtgcctcagtgcacgcggttaccaccgctgctgccagtgacacttgtttacattctctcattctggaaaaatgccagctgggcgcggtggctcacacctgtaaccccagcactctgggaggcagaggcaggcagattgcttgagcccagaagttcgagaccagcctgggcaacatgggaagcctccatctctacaaaaaatacaaaaagtggctgggtctggtggagtacacctgtggtcgcagctcctccagaggctgaggcaggaggatcacttgagtctaggaggcaaaggctgcagtaagccataattgcaccactgctctccagcctaggtgacagagtgagacccggtctcaaaaataaaaatcctggctgggcgctgtggctcacacctgtaatcccagcactttgggaagctgaggcgtgtggatcacctgaggtcaggagttcaagactagcctgaccaacatgatgaaaccccctctctactaaaaatacaaaaaaatagctgggtgtggtggtgagtgcctgtaatcccagctacttgagaagctgaggcaggagaattgcttgaacccgggaggcagaggttgcagtgtgccgagattgcaccactgcactccagcctgggcaaaaagagtgagactctatctcagaaaaataaatgaataaaaattttaaaaagataaaaactccagggcgctcctgtttgtccacacttaggtctctggaaatgaattgcatcaccaaggtctctgtgtgaaacaagataaacaaaaaagggtcatctgaaatgctgtgatttgtaactaaacaaagttctttttttttttttttccttcctgagacagtgtcttgcactgttgcccaggctggagtgcagtggtgcgatctcagctcactgcagcctccacctcagcctcctgagtcctgggactacagatgtatgccaccacacccagctaactgtttctttctttttttttttttttttttttgagacagagtctcactgtgtcacccaggctggagtgcagtggcacgatctctgctcactgcaacctccgccttccaggttcaagtgattcacctgcctcagcctccctagtagctaggattacaagcatatgccaccatgcccagctaatttttattttttagtagagacgaggtttcaccatgttggccaggctggtgtcgaactcctgagctcaggtgatctgtccacctcagccccccacagtgcctctgtttgtattttttgtagaaacggggtctcgccatgttggctgatctcaaactcctggtatcctcctgctgtacctggcagctaagttctttaacgagtaagatttgcattacaaagtttttccattgttggagaaggcctagccaagggtgctgaaagtacagaagccacaaaggctcccaccaggacacgggaagggctgggccccacctgcaaagtcagatctggagcaggggcagtgctggcatggaatacagtcctggagccgttccgcttgtgcccgcgctcctgtgcccatgggtccctctgcgaggtgccaggtcttggggagactgtcctgtgctgggatttgaagtctgctggtgccgttgtccatcttgcttttactttggcagctagttgttgggggccacttttacaaatgtacttcctttagcaggcatggtggtgcatgtctctggtcctagctactcagaaggctgaggtaggaagatagctggagcccaggaggtggaggctgcagtgaaccatgatcaaactactgcattccagcctgggcgacagagcgagagaccctgtctccataaaaaaaagtgtttcctggcagcacatgccaccacctggaatgcttctccaccagcttgattttctcccactacctcctctggtagggagctcactccagtgggtgggtggggctgtggccctgtcattgggagggctctgttcatgtgtgttggtcaatgaatgaccctccccaccacatccaacacaggatggggctgtcagaagtcaggggccgtgggggcacagagaggaaagagagagggcagggccccccatgcgaggctgggcagagagagggcctccaggaccgtggggagcataagtgtctggggaagccccgtccacacctgccaccctctgaaacattcagtcacacctgcagagtccctgctgccctgcaaggtggcctaggcacaggtcctggggtcaggaccctacgcccctggcagtccggatcgtctctgccctgcggcagccgcgtctacgtggtgagtcgcctgctggctgcatggggcttgtgaagccgccagtgctgggcgacctgcatggagccgacggtggtggctgatctaccccaaggagggcggagggctggcctccctctggtctcagatttgctggacttgaacaagttcctcgccgcttggctctgggactcttggagtctgagcaggggctccctcacccctgctctgaagctcagtgttcgggtcctgcctggtttttggtgtgccaaggggtacaagctactgtctgggcaatgctgcctgtgaagccgatgtttccagctgtcctccccaaccatggccacagctgacgtcctctgtggctgcacgcaccacctctgcacagcctggactgagcactgcacttccgacggagactcccccaggagcccctgcccccagggtggggttttcatgccacagtactgcctttgcaagtggtctctgctccgcggtttcctttctgtaagtgctggaggatctgtgtagatcccccttcatctgtgaatcggtcccggggggccccacacccacagctctcctggggctcaggatctgcatagattccctgttcatctgcagatcagtcccggggggccccacacccacagctctcgtggggctcaggatctgcgtagattccctgttcatctgcaaatcagtcccggggggccccacacccacacctttcctggggctcaggtctctatagaccctctggctccaggctcgggaaattgtcccccagaggctgtcttcactggggacagatgcttaggcctctcctcgtcctgggatggccagtgctggcccaggagtggtcgggtgtggtggggacacatgggcctttggggctgcgggaggcagctgtgccctgtggagaaccggtggggactgtgggtggggagaggccattctgggcgagggagaaggggatggggaggaggctggtgacatgacctggccccagtagggggcaggctggaaggagggagagctgctggccattgctctgtggccgcgtgggccaccctttgggcccatgtgctttgggctgagccatgtagagaaccctgggccttctatgtggtcgtgggcattgctgccctgcactctgccttcgtgtcctcatctgcacaggcggtgggcgctggcacccgtccatgaggccttgcagaggggacacgagataagccacgaaaacccactaccacaggactgtgggctgcatgctcttgtccctcagagcctgactggccccatgtggccgagccagggaccacatgcgtcccttgactgcgggcccagtcagcgctgcctgcgggctcttgcagaagaaacagccctgcggttgatcctatctccaaccccaggccgggagctcgtcagaggccacctggagctgtggaggtggcaatcaggccaaccgcctcagtatctcaggacagagtggtgctcgggatgacaggagcagcaccaaacccgcatgggtctgtccctacctggtgacgcaagccagtgcatgcctcaggtgtctgtttcctaaaaaggcaggtgtcgcctcggcccttctggtctccgtgagtcagcctcctccagggccctcccaggtcttttgtgtctggtgtctctcacagggtgcaacgtcctcagggcgtgtccgcgctgtggcctgggtagagccttgctcctttcatggctgggtcgtgttctggcgtgtggagggccgcgctggttcgtccctcacctgttgatgcgtatgtaggattttgccgtcttttggctgttgtgaattgtgcgtctgtgagcatttgtgtaccagttcctgtgcctttcccattctcctgggtgtgtatctaggaagtgctgggtcatgtggtgactgtgggtttctcttgcgtagacataactttatcatcacttaacattagtagcagaacgggactaagctttcatcactgacagactctgtgtttaacgattgaggaacttacctgccaaagaagtcaccagggactggggagagggatggggagtgagtgttccatggcgacagagtttcagtttgggaagatgagaaagttctagagatgaccgtggtggtggctacacaaccacgggaatgtgattaacaccactgaactgtacgctttttttttttttgagacagagtcccgctctgtcacccaggcaggagtgcagcggcacgatctcagctcactgcagccttcacctcccgggttcaagcgctcctcctgcctcagcctcctgagtagctgggattacaggcatgtgccatcacacccagctaatttttgtatttttagtagagacggggtttcaccacgttggccaggctggtctcaaattcctgacctcgtgatccacccgcctcggcctcccgaactgttgggattacaggcgtgagccaccgtgcctggccagaactgcacacttaaacgtgttcgagatggtaaactttaggtaaattttttcactttttttttttttttttcttgagacagagtcttgctctgtcacccaggctggagtgtagtggcatgatcatagcttactgcagcctcaaactcccagcctcaggcgatcctcccacctcagcctcccaagtagctgggaccacaggtgcgcgccaccacacttgagcccaggaggttgaggctgcagtgatccgtgattgtgccatggcactacagcctgggtgacacagggagacctgtctacaaaaagaaccgctgtatttacagaccggcagcctgtacatggccttgggctgtggtttgctggccctggtgggaagagcgtttttcctaggctaccttctgtctccatggcctgcacggaccttcactttattcttgtacaaacccccttcctgcctcgggctgtgcatctctctctggaacgttctttgcggtctcctcaccgccacttttcttcacacctcaacataaatgccacccccttggaggggccttcctggtttggctgagcctggtcccatgtgggctctgcatgggcccctggatgttaccttggttgtagctgagtgcggatgtggcttgtccacaggaggctgatgtccctggagctgtgacttggtctacctgggcctggacccacgtggccggcccggggcctgtgcgtggccagctcttgcacactgccttagagctggtgtggcttgttgaaccccgttgcagacgcacacgcacgtgggtccccatggctcctcgggacatggaggctgcccacgctcagggaagagtccttgtcgggacctccaggactcttcccagcccccgcctccctcctggggcctccagggcagaaagcccctttcccgggcaggaggacagggtgtggatatacaggctgggagggtctgtgggcagcagccgaggcccaggttgggggagcctcacctaggatgaggctagggctggcagaagatccccacagaggagccaggaggaccccacagtcactctagctcccagggcctggaggtgcaggcgagccccgtggtctccgggcagccggccctgccccactcacctctcctgcccttcccgctgcaggctaaccttgccgcgggccgagccctgcctcgccatggaccaggactatgagcggcgcctgcttcgccagatcgtcatccagaatgagaacacgatgccacgcgtgagtgcccccgccctgcccaccactgtggctccccctcccccagctgcctctgccctggccagcagcctcaggtgtccccactgtcactaaagccccacggaccactcaggtcccagtcccccaggtcacacggggcctccgcctcctgggctgtcagggttgccgccacccccagggccatagtcagagcccagcggggcttggatggatgaggaggcaaaaggcccagagtggtggagctggggcggccgcatgggcagaggcacagggtggcctgcagagcctttagggagacccgttcctgtctccaagccccaggcacatctggaaccctgtgggatttggggggccctggctttgtccttccttgcgctccaccctgcctccccagcccagccgtgtttgccttgccctgggctccaggcaggccactggccacacagggtctcggggctggtggctgctgtgtgacagccacatccctcacctgcttccccacccgactcctgcggggggctgaggggccaaactcctgttgctgtctacacaacatgaagcctgggtcggaatagcatcaggcttagcctggacggccaccagtccctgccctgtgatagacgcccaagccatcattctcgaagacgaagttgccattgtcccgagtccctcccccatgggctggcctgcatagacgggtctgaggggcatgggcctttggggaggggctgtcccatcgcagctccctcagtgccagcaacctctgtgcccaggcattgggctaggcctggggcaggctcaccttcaaggctttgttcagcttcagaccccaaagcctgggtcccgggacctgcgggagcccaccacagccgccttctccccctgtgcggtgcggcccccacagggcagagccagggaggcagatccaggatcgtgcgtgatgtagcagggtccccattggtaaagggacagggccactgcagaagaaaagtggcgtagaattagaggtgtctttgcaatctcagggatttcagagagagagaggcataaatacaggggcatctgtgtgcacagagaggatctgggcaccacggcgcccagcagcaggagcagccctagtgccgaccctcggtctccagagcactctcggggctgccaggaggacagtgggagcctgcaggcccagcagtgcgtgggagggcggggcgcagtgcgaggatccagcaccctccatccagtgcacttcgaagtctcccggatgcagccaggccggggtgtgaacgggagatgggggaggagcgggcattggcagttttgggagagctccccacatacccgtcctgccccgcagtcacccagcacagcctggactttatgacacagaaccaccttcagacccagacggagcgccaggctgtggagagacagccctggaaccctccaaagtgtcaaggccatgactgcgtcacaggctgggggcagggagatgtgacagcagacggaatatgaccctacgcaagcctgtgtttcctggggctccaccagagaggccgcagacggggcccacgcagcactcgcagaacctctcccagtcctgggggtccggagtcggaggtcacggtgtgggcagggccacgcttcctctcgaggctccaggggaggacccttcctgcctctcccagcttctgggggctcctgctatccgtggctgtgaccacgtccctctggcctctgcatctgtcctggaaccatctgcttgtgtctctgtgtccgtgttttcctcttcttatgaggatgcttgtcatcaaatcagggctcaccctaatggcttcctcttgagtataatcacatctgcaagaaactcgtgtccaatcagagtcccattcccaggttgcggggctcaggacttcacagtatccttttagggacaccggtcagctgataacagacccctcatagaaaaaagacggcgcggggacagtcagatggggttggagggttagacgggtgttgtgggcagcaggagatggggatgagggccacactcccaggtggctctgggtacagctgttgcgtgtcttgtgccgtcaaggcctgcgtctgtgatcatctagagacggtgaatgcatggcacctgcgcagcgttgggagggcagttggggtcttgtgctccctggctctgtcccctccgccatggcccccattcctgccactccaccccgtcccgtggccctgccctcaccaccctcctgcctggcagcgttgggaggctgagcctgcccgtgggcctggcatctcccggaggcttctggcacagaaatccctgaccatgagtgaccacgagtgactgtgtggctcccctccttgggttttcttttttttttttttttttttttttttttgagacggagtctcgctctgtcgcccaggctggagtgcagtggcacaatcttggctcactgcaagctccgcctcccaggttcatgccattctcctgcctcagcctcccgagtagctgggactacaggcgcctgccaccacgcccggctgattttttgtatttttagtagagacgaggtttcacagtgttagccaggatggtcttgatctcctgacctcgtgatccgcccgcctcggcctcccaaagtgctgggattacgggcgtgagccaccgcgcctggcccaccccttgggttttcaagatcaaagccccctttgctcagtggccagaggctgagagaggctggcctgggggcactctcggggggctctcggtgctgagagcaagccctctgctgatgcccttcaggtcacagagatgcggcggaccctgacgcctgccagctccccagtgtcctcgcccagcaagcacggagaccgcttcatcccctccagagccggagccaactggagcgtgaacttccacaggattaacgtgaggggctggctgggcaggagatgggaccccccgggaagcccagggcccctcccagcctccttgctctagggccgggaacaagcgggctcctcgacccctccctctctgctctcctgcctgcaggagaatgagaagtctcccagtcagaaccggaaagccaaggacgccacctcagacaacggcaaaggttagggtcccagcccatccgccctgcaggcccccaccctgccttgccccgcctcactgtgcttggtgcccgcagacggcctggcctactctgccctgctcaagaatgagctgctgggtgccggcatcgagaaggtgcaggacccgcagactgaggaccgcaggctgcagccctccacgcctgagaagaagggtctgttcacggtaagcctgcggcaccccccacccgggagctggctcccagtgcagcctccccggccccccacctcccaggcaccagctctgcctccccgagcccggttctcgggcccagccacggctcagcacccccgccctgaccctgttccttagccaggtcaggggccctgggatctgaggctggaggtctagcaggtaaactgggatgtgggggtgcgggaggaatccaggctcagcctgttgggctttttctccccacaccaatgctacctggggtcccgaacacccaagccggtgggggtcctgcccgtagggggcagtactgggtcctcccacagggccccactctgtccacatgatccgggagctcaaaggcaggatcacacggagcctggcttgggtccctcgagagagggcgggaggggtggggggtccgcagtccccgccaggaaggcgcctgcctttttacagctgctccacacagggtctcagcacctgccttagggctatgagctgtaccgggagcgtgggctgctggggggctctgagggtcctgcggcctgggcgtgcgctcagctggcatgtcccccgctccacagtattcccttagcaccaagcgctccagccccgatgacggcaacgatgtgtctccctactccctgtctcccgtcagcaacaagaggtgggtcccagcttcctccgcagccctccctactccctgtctcccgtcagcagcaagaggtgggtcccagcttcctccgcagccctgtccctgcgggtcctggtgggcgaggctgaagggggcttcccagggcatagtggcctggagctgtgactgtgtcctcccccagagtccttagagtggaggggccccagccccccatgaggccatggtcagtaatagaagtgtagtccaggcctagagcagcccagagatccccttgctgagggcacaccatggcctggcagtgttggcctcagacaaggggcagggtagtcaggaagggctgcctggaggaggtgtggggagcagagccagcacagctgtggaagggaggccagggcagccagacacccgagggtgaaggcctgtggggctgtccctgggtttaggatcacatggtggcggtggtgattggaggggccggactgggctcctggggctggcagggaaggagacacttcccaagcgtttgcaagaggtgacccaagtgccgtggctcacggatgccacgtggccgcctctgcagccagaagctgctccggtccccccggaaacccacccgcaagatctccaagatccccttcaaggtgctggacgcgcccgagctgcaggacgacttctacctcaatctggtggactggtcgtccctcaatgtgctcagcgtggggctaggcacctgcgtgtacctgtggagtgcctgtaccagccaggtgggtgctgcgtggggtgtgcatgtgcatgggggcctccccagctcccagcagacctcaatgtacccaccgggatccagggagcatcagtacgagccaggcgcctgccatggccctcctagctggggcctcccagcctcccagccacagccctcccagccactaccctcccagccctcccagccatggccctcccagtcagggcctcccagccacggccctcccaaccctcccagccatggccctcccagccactgccctcccagccagcagtggcatctgcggcagcatggggtccccactggagccacaatctctgttcagctctatagagaagaagagacaggtgtcccagcctggctgagcccaggggccactatgaccaccgagtggccgctgtcctggagtggcctctgggcgcatggagcctgctagtccctacagggagactgggttgctggtgcagggcagcagcagacactgcccgctggggtgggggtttcagggataacgccatgcgagtagtttcgggagagcgagggttggcgccctccctgcagcctatgagctgctcccgctggcagtgtcccacacccttctaggccctgccctcaccatttgagcgtcctctcccggcagcaggagccgtgtagctctgggcagcttcctcccatcctctgctcgtcccatgcaggctctcccctgtgtgtgtgtgtctcccctgtatgtgtgtggcaggcttgagcttgccaggtcccagcagtgaccaacccagcgaccccatgggcctggagtgatgagagagtgaatgagtggatgggagagtggatgggagagtggatgggagaatggatgagagagtggatgggtgagcggatgagagagtggatgggtgagcagattagggagtggatgggtgagtggatgggagagtgggtgggtgtgtggatgggtgcgtggatgggtgcgtggatgggagagtggatgggtacgtggatgggtgagtggatgggagaatggatgagagagtggatgggtgagtggatgagagagtggatgggaaagtggatgagagtggttgaggggagtggatgtttgagtggatgggagagtgtatgggagtggatgggagagcggatgggtgagtggatgggagagcagatggttgagcggatggatgagcagatgggagagtggatgagagtagttgaggaagtggatgggtgagaggatgggagtgcggatgcttgagcggatgggagagcggatgggagagcagacggttgagcggatgggagagcggatgggagagcggatgggagagcggatgggagagcggatgggagagcggttgggagagcggttgggagagcggatgggagagcggatgagagagtggatggttgagcggatgggagagcggatgagagtggttgagggagtggatgggagagtggatgagagtggttgaggaagtggatggttgagtggatgggagagcggatgggagagtggatgagagtggttgagggagtggatgggagagcggatgggagagcagatgggagagcagatgggtgagcggatgggagagcagatgggagagtggatgagagtggttgagggagtggctggttgagtggatgggagagcagatgggagagcagatgggagagcagatgggtgagcggatgggagagcagatgggagagtggatgagagtggttgagggagtggctggttgagtggatgggagagcggatgggtgagtggatgagagtggttgagggagtggatggttgagcagatgggagagcggatgggtgagcagatgggagagcggatgggtgagtggatgagagtggttgagggagtggatggttgagcggatgggagagcggatgggagagtggatgggagagtggatgggtgagcgcatgggagcgcatgggtgagcggatgcgagagtggatgagagtggttgagggagtggatggttgagtggatgggtgagcggatgggtgagcgggtgggtgagcgggtgggtgagcgggtgggtgagcgggtgggagagcggatgggagagtggttgagggagcggatgggtgagcggatgggagagcgcatgggtgagcagatgcaagagtggatgagagtggttgagggagtggatggttgagtggatgggagagcagatgggtgagtggatgggagagtggatgggtgagcggatgggagagcagatgggtgagcggatgggagagcggatgggagagtggatgagagtggttgagggagcggatgggtgagcggatgggagagcgcatgggtgagcagatgcaagagtggatgagagtggttgagggagtggatggttgagcggatgggagagcagatgggagagtggatgggtgagcggatgggagagcagatgggtgagcggatgggagagcggatgggagagcggatgggagagcgcaggggagagcggaggagagagcggaggagagtggttgagggagtggatggttgagcagaagggagagcggatgggagagcggatgggtgagcagatgggtgagcggatgggagagcgcatgggagagcgcatgggagagcggatgggagagcgcatgggagagcgcatggatgagcgcatgggagagcgcatgggtgagcggatgcaagagtggatgagagtggttgagggagtggatggttgagtagatgggagagcagatgggagagtggatgagagtggatgggaaagcggatgagagtggttgagggagtggatgggagagcagatgggtgagtggatggaaaagtggatgggactgtggatgggagagtggatgagattggatgggagagtggatgagagtggatgggtgagacagtggagggatgaatgtacccatggatagactggggcttcgagaccagcggcaaagctcacactgacctctgcctccaggtgacgcggctctgtgacctctcagtggaaggggactcagtgacctccgtgggctggtctgagcgggtgagtgcagagggcttggcccccacctgggagatctgatggggctcttgacagtgttgggggccttgaagacccagagggtctagtgcgtggcctgaggtcgcctgtgtccaagcataggtctgtgtcccccactgtccccggccttagtgtggtcctggtagagggagtaacagggatgagcaggcacccaccaggcccctagaaaggatggcaggtccagtggggaaataacgccccagttccttccatgggacctgcccacctgggactcgctcccctggagttccattttccactcagggtcgagtgggctttagttccattttagattatgatgaaaacatctcagcagcagctttgaagcatatcatggggagggtctgtgcccctcacccagagctgcccagggctgcccctagcactcgtaaccgctcactgtgtccaggcgtgtgcgctcaccctccctccatccatcttaggttttcatgtgcctcaaagtcagttgcagacagcaacgcatgttgcccagctcctgggcctgtgtggaacctggagctcagtgtctgcagtttctccttccctctgtgtgaaatgtccatgtgggaaggtccacgtaccgagtcttggctggactctgagaaacccaggcgcagtgtgtgcggggtgtgcccgccaccccagcatgcactgaggggggtttatgcttcttccgaagggacgtgcattcgagagtcgttagggaaaccgtcccagagccctggtgaggagagagcctggcgcgaccaacgccaggacgggcacagtccccgggccagacctgacaccggtgctctgcccatgccttccatcctaggggaacctggtggcggtgggcacacacaagggcttcgtgcagatctgggacgcagccgcagggaagaagctgtccatgttggagggccacacggcacgcgtcggtgaggagcccgggtcccatggctggtgagctccctgaggccccagctccgcgagggcaggagaggctcacccccgcttccacctggcctccaggggcgctggcctggaatgctgagcagctgtcgtccgggagccgcgaccgcatgatcctgcagagggacatccgcaccccgccactgcagtcggagcggcggctgcagggccaccggcaggaggtgtgcgggctcaagtggtccacagaccaccagctcctcgcctcggggggcaacgacaacaaggtacccccgcccagagcctgggcttccccttcaccagaagccgcacccctcacactggcaggaacggaagagcctgggctggggcgggcgcgggcgcggggcccactccacagccatcagcagggcaccaggcttgtccttcctgctcagccagtcctgccctgtggcacagggtgacgagtgtgtgcccccaggggtccttgagggagcagcaggaggagtgtggggtggggtgccagggcaggtcgtcacacctgtgaggaccggcctatgggaccacagggctgggacagccccggcctcacagcccctgtcccccagctgctggtctggaatcactcgagcctgagccccgtgcagcagtacacggagcacctggcggccgtgaaggccatcgcctggtccccacatcagcacgggctgctggcctcggggggcggcacagctgaccgctgtatccgcttctggaacacgctgacaggacaaccactgcagtgtatcgacacgggctcccaagtgtgcaatctggcctggtccaagcacgccaacgagctggtgagcacgggcggcccggcctcccaccaggcctcaggatgtgcgtcctgctggccccttacctgccacctgagagcagcctgtggggagatgggtcagagtcgctctgaagggagatgggcgagggaggccgagcggggaggcagggagttgtggggggcaaggcccctgggcctcatcagggcctcacctggggcaagacttggggcctctgggcccccatcgcagccacacctggcggctctgtgaggagccggggagctcctatggctgcctctgcttagaggggaggcccaggatgaagcgggctccactgagcaccctggcctgctccagccactccgggcgtgtcaccaggacagtctcgggggtgacttgcaggtggggcagaggggctgtgggccccgtttgggtccttgttgggctccagcctttggcggtgggtggaggggtccacctgtggcctccacacctcctagacagactcaggtggcagagccacatcccagcatcccctgctcctcctgggctggctggcggctctgagctctcacatgggctcaggcgggtgcatgtgaggcagcaggcatagcacccggcctcgttgcccctcaccgaccgcagcgccccctccgccctccaggtgagcacgcacggctactcacagaaccagatccttgtctggaagtacccctccctgacccaggtggccaagctgaccgggcactcctaccgcgtgctgtacctggtgagttcacgccaggcacttcaaggtgccccgggattctggacaaactgccatggccaccccagagcaccctgtcctgtgttcttagggaggatggtgtgcagatctaaaaccccgtgggacccagcagcaggggccggcagggcatctggtgctggttgtgttgccagcgttggaatgggctctaccgaactccccagccctgcaggtgcaggccctgtcctcctggaggaccttagcttcttcatttgtttattttccccataaagaggggtgaagaggaaagccaaaaccaactcacagctgaccactcagatgaccctgtgaacgtcctacacagtaactgtatgcacgtggctggatgggggccaggaggcgtccttggccccacgtgccctcacttgccaagattttgtttcttccctgaaaaacatgttctgtgctttcatccgcgcatctgacagtccctcatctgtgcagagttgatgagcccctcttgcaagggggcgtcctttgtgtttttgcaaaaatgctccaaccttggctaggtgcggtggctcacgcctgtaatccctgcacttcaggaagccagggtgggaggatcgcttgagcccaggagttcaagaccagcctgggcaacatagcaagaccccatctctacaaaactttttttaaatgaggtgtggtggtgtgcacctgtagtcccagctactcaggaggctgagatgggaggatcacctgagcccaggaggtcaaggctgcagtaagccaggattgccccactgcacactccagcctgggtgacagagccagaccccgtcttaaaattaaaaaaaaaaaaaaaaaaaaggctccaaccttggtttctgcttgtggtggccccagcctgcccctccctcctggctccagagtctggggggcccagccacccgacaccttgctcccctctccttcagtcccccagcactgtcccgaggcacctagaggcccagagacatggggtgcttccctcctgtccacaggcaatgtcccctgatggggaggccatcgtcactggtgctggagacgagaccctgaggttctggaacgtctttagcaaaacccgttcgacaaaggtaaagtgggtcggtatcagcgccactcgcccccgccccagcctgtcccagggtcgtccctgtccccactgtcctcgggcgtaccctcctctgggttcccccacttccgagcttccctcacctcaaattctgggtcatgtgtcggggcagtgtggcaggccgaggctgaactggcacctcccagcccctcaggaccaagccccaaagccttggggaccctccaggcagcttcctccctgggcctgcggctcagcgcatctgccatccccatgtgtctgcaggagtctgtgtctgtgctcaacctcttcaccaggatccggtaaacctgccgggcaggaccgtgccacaccagctgtccagagtcggaggaccccagctcctcagcttgcatggactctgccttcccagcgcttgtcccccgaggaaggcggctgggcgggcggggagctgggcctggaggatcctggagtctcattaaatgcctgattgtgaaccatgtccaccagtatctggggtgggcacgtggtcggggaccctcagcagcaggggctctgtctcccttcccaaagggcgagaaccacattggacggtcccggctcagaccgtctgtactcagagcgacggatgccccctgggaccctcactgcctccgtctgttcatcacctgcccaccggagccgcatgctcttcctggaactgcccacgtctgcacagaacagaccaccagacgccagggctgattggtgggggcctgagaccccggttgcccattcatggctgcaccccaccatgtcaaacccaagaccagccccaaggccagaccaaggcatgtaggcctgggcaggtggctcggggccactggcggagccagcctgtggatccaagagacagtccccacctgggcttcacggcatccttgcagccacctctgctgtcactgctcgaagcagcagtctctctggaagcatctgtgtcatggccatcgcccggcggtcagtgggcttcagatgggcctgtgcatcctggccaagcgtcaccctcacactggaggaggatgtctgctctggacttatcaccccaggagaactgaacccggacctgctcactgccctggctggagaggagcacaacagatgccacgtcttcgtgcattcgccaacacgtgccctcacagggccagcgtcctccttccctgcgcaagacttgcgtcccccatgcctgctgggtggctgggtcctgtggaggccagcagcggtgtggcccccgcccccaggctgcctgtgtcttcacctgtcctgtccaccagcgccaacagccgtggggaagccaaggagacccaaggggtccaggaggtgggcgccctccatccttcgagaagcttcccaggctcctctgcttctctgtctcatgctcccaggctgcacagcaggcagggagggaggcaaggcaggggagtggggcctgagctgagcactgccccctcacccccccaccaccccttcccatttcatcggtggggacgtggagagggtggggcgggctggggttggagggtcccacccaccaccctgctgtgcttgggaacccccactccccactccccacatcccaacatcctggtgtctgtccccagtggggttggcgtgcatgtgtacatatgtatttgtgacttttctttggatttgttttgtgtttttgttgactagtcctggaaatgtttgaggctagacggggaggggccaggacccacccactgctcctgggggatgaggtcctggttttaaagccccgtcatttcaagcgggtcgatcttccacattcactggagagactctccccacctctgtctgggtggggcgcggacccctcactgtgcgcctgtgcagggggtgctggtgcacgtggcagtgtggatttccagtggtcacggtcttactgtttcaaggtttttaaataagaaaaccaaccctgccttcgcccatgcccgcccctgcccgcagttgccaaagagccgccttgtcgctgtgggcgtcagggcttggctggctcagtgcacaacccacagtggccttcagaggctcctcctgggactgggaaccgccgcagggccaggcggacggcgtgaggtttgtgttggggctggttctgcccatgctagggggtgggggagctcccaggacagaccagccttgtttctcatgtaatgcagtgacgctgtcattaaacacgtggattcatgtgtggccgggactggctggctctaggtccccggctcgggtggggtcacacggtcctgccctagagtccccatctggccctggagctgcagaagcagcttctgaggggcttcccaggcctgcatttcacagatggggagctcagccctcgaaggccgcagagacgcctcccaggcccgtctgccagggcgccggccacaatcctgcagggccaaggactggactccaggcaagtccctgcgctccagctggacggccctgttccagggaggaggtgctcggttgacaccatcagggagggagggtgggcactgctgggctgagttcacccccagggctggccagatggggccaggagggacagagcaaggggggtgaaggccgtggtgggagggtcccatgatgatgggccagggctcgtgtagaaatgggggaattggttccccatggcccaggacagctgagaggaggtggaggggccccaggggagtgtacgtcaggctttgcggggcacgggggccactcagcagcgctggggcaggtgcctctgctgtcagctccacccgacaggcagacgaaggccagtggggccatcgcttcctggggcgaccctggcagtggttgggagacgcccagatggagggggaggctgaccaagggccccgcagggcgggctgcaacttttctgttgatcctggaatgtagctggtgcagtgagagggaaagagaattgaaaaactcaggctgccataggttctgcgatgagaggtgcaggaggcaggagcctggcccagggggtgctggtgcctccccggggtctgggcggagagaacaggaggaatggctgggaagtggctgagggagccaggaggccggggggccgggggctgcaggggaggctgtgggggtcctggcagccaggaggccccaggtggttttgaggctcgctcttgcgcggtgcctgagaagagggtgaaggagctggggcaggccccatcctgggcattggagatgatgaaaccgagcagacctggcccatgtggagctggcatgggggacacagcccagagacagagaagcttatgaggaagtgaggaggtggcgtcacaagggtggggagggggccttggggaagggcggccttggatcagaggctcaccacaagcctggcatttcagccagggctggagaaggcagggacgcctgggtgagaggcaaagggcacagccatgcaaaggccctggggcaggacggcacctggtatgcgggaggaacagagtgaggagaggagggcagggcgtgcagggccttgtgggcctcagggaggacttgggcacctacgccgagggagtggagctcctgggtgcgtgtccagatgggaaaggcagggtcgtatctgtggggacctgacaagggcaggggaagcggagaccagggtgcaggctccgcccccacccaaggccgggcccagccagaggaggggcagggcagggcaggaggtttctggatgtttgttgggtttggtttggttttgttttgttttgtttattgtggtaaaatacaaaatctaccgtcttacagtgaggtggcgttcagtaccttcaccacgccgtgcagccatcccatctgattccagaacattctcatcacccagaaggcagccctgtccccattatgtcacctagtcacccccaggtccccctccccagtcccggcacccacgaatcctctccctgattctgtggattggtctgtcctggacatttcatagaagtgggatcacagcgtacccttctgtgtctggtgtctctcactgagcgtgacatcctcaaggtgcatccgcactgtggcctgggtcagagcttcgcacctccttgtggctgagtctcgttccagcacggtggcggcgccgtgctgatcccctcaccttcactgggtgttcggtgttctccgcctcgggctgtcacaaatcgtgctgctgtgagccactgcgtgcaggtctcatcctgggtgtattttacaaacggactggatgtgagtgggtgaggagtgaggagctggggtgacaggtgcctgcgaccccggccaggcactgcctcctgcgatcgaaggggcagggggagacagaagcccctcaagggggtgtggagatggagaagccagaccccaggtggggggtgcatagagctgggggctcagggccacggaccccacctggcagtggccctggccttgcccacccacactgtgtcacccccagttgttaaatactcagaacgactctccagcccttccctcgaggccacctcaccccgcagctgggaggagggagtggtcagcgtggttgccgagacactgggtggcctttatgctgtcaacggtggcctcagaggccttctggcaggagcccgggggatccaggcagacatgcaaaccctcaggcaagaggctgcacggccctgtatcccctcggggaccctcgaggccagcttcccagcaccgctgtacaggtgagcccctccctacaggtgagcccctcccagcccctccctccctccctccctgggtgtcaggttacatggtgtttggtttggggtcttgcacgtgtcactcgttattcctaaaaggctcatgtgtgtgacgtcccctccagctcttcctgttcccctccggccagtggccgctcactgtgggggctacagacctggagacaggccaagaacaaatgtgtctgcggccgtctccaaggactgcaaacgcactgggagcttcggccacagaaatgttcgccctctgaaatccaggcctgtgcggggctgggcccttctgtggctgagagagtctgtcccacacctcttgcagcccgtggtggctctgggcaaccccaggcactccttggcccccggtctctgcttctgtcttcacccggccttcctgtctgcgtccaagtttccctctccttataagggtgccaggcactggattcggggccatcctaacacggggtgacctcatcttagctgcatctgctaaaaccatttccaaacaaggccatgtcctgaggctctgggcagatgtgattttgggggtataccagtcaccccgatacagtgtctattatcaattgtttaaacaattatggaatactatgcagccatgaaaaagaagagtgaaagccctttgctccatttccaaggaaagaaattaaaccaagatggtggctgggcatggtggcccacacctgtaatcccagcactttggaaggctaagacaggaggatcacttgagcccaggagttcaagaccagcctgagcaacatagtgagacccatctcttttcttttttttttttttttttttttttgagacagtctcatactgttgcccaggctagggtgcagtggcgcaatcttggctcactgcaacttctgcctcccaggttctaggattcttccatctcaagccttctgagtagctaggactacaggtttgtgccacatgcccagctaatttttgtttttttttttggacggagtctcactcttgtcgcaagactggaacgcaatggtgcaatcttggctcactgcaacctccaactccctggttcgagcgattctcctgcctcagcctcccaagtagctgggattacaggcatgcgctaccatgcccagctaatttttgtatttttagtagagacggggtttcaccatgttggccaggatggtctcgatctcctgacctcatgatctgccctccttggcctcccaaagtgctgggattacaggcgtgaggcaccgcgcctagctgtgagaccccatctctataaaaaatttaaaaatcagccaggcagccaggcgcagtggctcacgcctgtaattccagcactttcggaggccgaggcaggcggatcacctgaagtcaggagttcgagaccagcctgaccaacatggtgaaaccccgtctctactaaaaatacaaaattagccgggaatggtggctcatgcctgtaatcccagctacttgggaggctgaggcaggagaatcacttgaacctcggaggcagaggttgcagtgagccgagatcgtgccactggacttcagcccagagcgaaactccatctcaaaaaaaaaaaaaaaaaatccaggcgcagtggctcacgcctgtaatccccacattttgggaggccgaggcgggtggatcacgaggtcaggagatcaagaccaacctggccaaggtagtgaaaccccatctgtactaaaagtacaaaaattagctggttgtggtggcgggcgcctgcaatcccagctactcgggaggctgaggcaggagaatcgcttgaacctgggaggcagaggttgcagtgagccgagatcaggccactgcactccagcctgggtgacagagcaagactctgtctcaaaaaaaaaaaaaaaaaatcaaccaggcatggcggcacgtgcctgtaatgccagctacttgggaggctgaggtaggaggatcgcttgagcctaggaggtcaaggctgcagtgagccgaaatcgtgccactgcattccagcctaggtgacaaagcaagactgtctcaaaaaaaaaaagagggtctcgctcggttgcccaggctggagtgcagtggaatgatctcagctcactgcaacctctgcctcctgggttctagcgattctcctgcctcagcctcctgagtagctgggattacaggcacccaccaccacgcccggctaatttttgtatttttagtagagacagtgtttcaccatgttggccaggctggtctcaaactcctgacctcatgatccgcctgcctcggcctcccacagtgctgggattacaggcatgagccaccgcacccagtgcaagaccctatttctattttttaaaaaaatggagatgcagtgaatgggctcccgcaagtgtgtaataacgggggtgagtgcatgtaccacctgctcctgggaggaaacaccagaaagtagtgagtggcaggtgggtacggggccgacagcaggggtgaggggctcatttctcattgaatattattctgtgctgttttgtttgtgttgagacagagtctcgctctctcacccaggctggagtgcagtgacgcaatctcggctcactgcaacctccgcctcccgggttcaagctaattctcctgcctcagcttcccgagtagctgggaccacaggtgtccatcaccacacctgactaatttttgtatttttagtagagacggggtttcaccatgttggtcaggctggtctcgaactcctgacctcaggtgatctacccaccttggcctcccaaagtgctgggattacaggcatgagccactgcgcccagacaattttgtgctgttttaattgtgttttaaaagctacatgtgtcttgcaattcatttcaaaagggtgaggttctcctgatcttgaaattgcctttctagtggaaaagccgagtctatgtggggtccctcaaacaggctctgtaactgaccaggctactcccatgttctgtgggcacctgggagtctagtcaggatttaagcagagttcctgccatgagagctggaaccgggctttccgtgcagggcagatgagattgttttgaaccctgctagactgtcttggggccagcaaccttgttttctgggatgacttccttgggacatattcccaagagcaaggtcaaagcataaaacatctttgagtctcttgtctttttgtttttgagacagagtctcactctgttgcccaggctggagtgcaagggcacgatctcagcttactgcaaactccacttcctgggttcaagcgattctcctgcctcagcctcctgagtagctgggattacaggtgccccccgcccccacaccatgcctggcttaattttcgtatttttagtagagatggggttttaccatgctggccaggctggtctcgaactcctgacctcaagtgatccacctgcctcagcctcccaaagtgctgggtttacaagcgtgagccacacacctggcctagtgggtcccccagtcttccctgggccatggcttagtgccagccccagaccacttcttcctggtgcacctccaggccaggggggcttcccagaggaagggacttgtgggtcttggaggctggacaaggactgtaggaatccaggagtagccagggcccttgtcctctcccctccctcttctccaggcaagaaaagctgagaacagaaaggtttagtgctgacttgggtgcttggggtgcgatgtgtggggagagggggagtcagcctctctcctcaagcacccactctggggtgaggggtacagggctgaaggacagactccaagtggcgagggagggagaccccacgccgtgggccaggcctctacatcatccaccctggcagacatcgcaaaggggtcaaagcactcgctgtagacatgggctcagtctctgccccctgcccaccctcagcgatgactacctgtccctggagggttcccgctggccaccagccatcaggcaggccacacgctggaagtacacgcccatgggacgggacgcagccggccagctgtggtacacaggcctgaccaactcggacgcctgggaagcctggtacaacctgccacgggccccggccagccccttccgcgaggcctacaaccgctggcacagctgctaccaacaccgtgagtgcagcatgccatcgggtgagtgcccccccccccgccctgggcagcgggcctgccagagggggacaggaatgaccgccagcccccgccccaccgcagcctacacccagcacctgcgggagaccgcctggcatgaccccatcgtccctgcccagtaccaggcccccagcacccggtgggggagcgcgctgtggaaagacaggccaatccggggcaaggaatacggtgaggctaggtgcagggtgggtccttgggaggccagggggacaaggccacctaggccagggtgaaactgcccggggcgatccaggagccccttgctggccaacggcgaggaggtgggggcacatggtgacccgagtcccacctacagtgctcaacaggaaccggtacggggtggagccactgtggagggcatcagactacgtgccctccctgtcggcaccccagcgcccgcccggcaccacccagaactaccgggagtgggtcctggaaccatactgcccctccacctgccagcggtccccgccttccctcacacccactccccgataaaggcatgctaccaggatgcacccactgtctctgcacccagatgagggggcactaacctagtcccaggggaccagaggctcgggacagaggcagacactgggctcgctggccgcccacaaccagggcagggctgagatgcccaggctacccctgcccagagcccccccgcaggcagacaggagccaggctgccgtcatctctttatttgctgccagcagagtccaccaagcctgccgggcagccctgctgcccaccacggtggggtccaggcccagcccaccaccccgtggctgtctcctccaggctccagccgtcctgagggggccctggcagtgtctggagacccccaggctggaggtgaggggtgaactggactgagctcagggttagggttcccccagacccttctgggattcctacttcctgttccctgccgagaggggcaccccaaatcctccagagggctgggatggattagagttgagaatgggacaccctcaaaacccagggggtccttgcaagtccctggcgggcatccctgctgccctcacccgaccccacccccgggagctgggtgaggatggagggtgggggtccagagaagagtgaggggcagtgggggcttttccccaaggccctggggggcatcctcgtgcgtccccacagttcccttgcacaggtgcaggaggctgtcaggagtcagggccgggcatcacggtcccctgcaagggaggggtggaaatggcattagagagtgtgggtcagtgtctggggagggaggggtgggccaggactcacagcgtcgcaggcgggtcggccacagcaggaggctacagagacacagggcagcggccacgcccacgccgcccgtcacagccaccatcgcccagtggtaaaagctcacgcaggccctgcagcagagctctgagctgtgggaggaggcgggggatgagtaggcaccgcgggtaccacccccccgccacccaagctgaacctgtgcctcccctcacccccgacagcggctccgtcctgtccaatccaggagctgggggccctgccactccctccctcctgtcccacacccaacagctcggccagtcctgtgggccctgcttccagcatccatgccaaatccaccatgtctccccttccctgtctcctcatggtccagccccagcatggcccgcctgcacccgccccggtcccaggctgcaacttctcccccagcagctgtcctcccggcagcaaccaccagagggcgtctgtgagcgcctgggtcagggcctgtccctcttctgcccacagctctctgtgagtcccactgtcctcagggtcaaatcccctaagtcctccccatggcccaccaggccctgcacgacctgccctcccctcctccctctactccagccacacaggcctcctccctgttcttccaacacaacatgccaggtgtggtcctgccccagggctttggcactacttgtccctccccattggcctggaatgctctgacatcctgcaggtgtcagggccacgtcacctcctccaagaagccctccctggcttcctgccctggctgtccaggtttctctgagcgttcacctttacacaccacccacgccggtaccaaccacatgttcacctctgtgactattaacacggctggctctgccccaggcccagaccggctgtggtttccaggccctgggcctctacaggcgtgaatgctgtgatgctgtggtctagaaccatccatgtctgaaccctgagttctgtgggtctgggttacacggactcggggctcccttccagctgggcccacccccgatatatttctgtacggtgtcttcagcactgcacacatggacccaacgtttgttgagtgaataaacgaagtgctcagtggaagaaaggaaaggtctcccctgcctatgactcccattggggcaggtgtctttggtccacagctggatgcccagacccagaacactgctggacacacagcaggcgcttaatcccctcttactgaacaaaagaatgaatgaacgaacagcggcactcacgggcaagggtgcaggctctggatggccatgactgccagcccattggccaccttatccaagaagctcatggagccgtacacgaacgctccgctgttctgtggagacacaggcgaggtggtcagcgtgcaccccgagatctaggacccggcctcccccaccccagcctggctaccagccctaccgtgtggggaccgatgaggtcggccgtcatggccagcgaggtgacgaggatggtggcacagccagcacccagcagcacagccgctgcgtacacggccacacccagtccctccgccagcgccacccaggcggcaaaggccaggatcaccaggaggcctgagaagtaggtcatctgcagggacagccccggggtcaggcccacaccactgggtgcccccaagcctggcgcttcaatccgccacccctacccccaaccccagcaaacaaggcatgagctggatggtccctaaggagccctggctctggccctggacacaacaccgaggctctgcagatcctccatgccagagctgtgctctctgtccacgccgtagcggctggagacgtgtggctattctgcctgagcgcaggtcagttacaacgaaagcaaacgacggactcggctcagtccccacggccacatttcaagccctcagtagctgcacagggtggacagaaagcgccagagctccatggctgcgagtgtataaactcgagacacagagaagccaggatcctagaattccttgttcccagatctggggctttttttttctggagacaagagtctcgctgtgtcgcccaggctggagtgcagtggtgtgatctcatctcactgcaagctccgcctcccgggttcacgccattctcctgcctcagcctcccgaatagctgggactacaggcacccgccaccaacgcccggctaattttgtttttgtatctttagtagagacggggtttcaccgtgttagccaggatggtctcgatctcctgacctcgtgatccgcccgcctcggcctcccaaagtgctgggattacaggcgtgagccaccgtgcccggcctagatctggggcttctacaaggcgggaactcggaggcctgagagcatccgaggatggaacccggagcgggtgggatctcggctgcagggcaccccatcctccgccccagctgtccccggtccccgcccactcacgttcctcccaatgcacttgttgatgggcttcatgaggaaggaggacaagaagccgctgaggtacatcaccaggggaatggtcgcgatgaacttctgcggaggcagagccaggcatgccgtgtcagtcatggctcgccaggctggggccgtcccatcccagcgtccccgccccaatctgctcaccttgggcaggtggagcgagtaggtgaggtacatggccatgtaggtctgggacaggttcacgatgagcctggtggtcatgtacagtatgcccacctgtgggcagaccgacagagggactggcaggggtcaggagggccttctccactcccaccagcagggggcaccggggccagggtgggcgccctgcagctggcatttgatccattggtagtgactgcccagtggggtgggccaggaagaggagagcagcacttgatgagtgacgtttgccctgggtgtgggctgcaccaggggccacgtgtgctctgcgtctggacgcagctgccccacagagcaaaggccctgtgggtgggagagaaggcccacgccagccccaccgtccccagcacgcacctggtagaaagccggctcccggagccagtgcttccagagcagcaggggctgggccgtggcaggggccaacaggggggtgtgctcgcctggctcctccgcatgcggccggcgcctctcccgggtgcccaggtggaatagcagtgagaacacggcgccgacacccaccaccagcagggacaggttctggggatgcagcagaagcagtcagtggtggcgggcccagcccccgcccctggctcgaggacttcaggcgacccacccggactccagctcacccggaacacgggcacgtcctggccccccagctggtcgctgatgctgatgtcttgggtgggctccacccgcgacgagccctgcaggtgcagcaggagccaggcggcgccgtagacggtgatgttggccaccacggtgaacgcatacctggcgggcaggcgggcagggactcaacaagacgccaggaacctgggtcacttcctccccacgtggctacgccgtcagagaggcctggggaacccctgactgacaggtgattccaaccactgccacactgggtggcctccaggaagcccgtgctggcctcagtttccccagcccgcacattacctaacgcgggaaagctgtgacctgcagctccacccttcgtgcccaggaccagggtacagtgactcggccaagcggagtccaggctacaacccaaaagtctgagaacccagagactcagaagccagaattcgagaattcttcttccccagatgctgggcggctaaagggcgagggctccctggtctagaaccatccaggccagcccctgcccacagcccggccaggcacagagtcccccggggggcctcagaatcctaccatgaatcagtctctctttctgaaagcgggaaccatgccacctccagaggccacgtgagcacagcaggaggtcagctggcaaagcaatggcacgtaggaagtgcctggggtctggccccggtcagatggggccctcaggggccctgggcattgggcaacctgtgtcgttagcgcctgcacctctgtcacatggccataatggggaactcaaatctgggggtggggaggagctggtgatacacaggcagatgtggagacagcggactcccccgacacgaaggcgctgtgaggaccctggctttgggcaccagctggggccgagtcctcctctgaaatacgcgggagagaagagttcccacctcccagctcacggggaggattaaagaagctgagattcatgttaagggcctataactatgccaggcacacggcaggtgctcaatgcatcatcctcgtaaccagaagaacctcttccagcgcctctagcaagttagtggataagccgggcacccgctgtacccaggtgtaatagaaagaattctaaggcagccccagagaggcctgcccatcccatcccctccccgtggcagcagcagctgtaagtccaccatggatgttactcccaggatgtagccagggctaagtggcattctatagcagagggaaagggacttcgcagtgtgttataaccaaggaccttggtcagctcgggtgtgtccacagggagattactggccaggcgcggtggctcacgcctgtaatctcagcactttgggaggctgaggcaggcagatcactgaggtcaggagttcgagaccagcctggccaagacggtgaaatcccatctctactaaaaatacaaaaattagccgggggtggtggcgggtgcctgtagtcccagctactcgggaggctgaggcaggagaaccgcttgaacccaggaggcagaggttgcagtgagccgagatggcgccactgcactccagcctgggtgacagagtgagactcttgtctcaaaaaaaaaaaaaaaaaaagccaggcacagtggctcacgcctgtaatcccagcactttgggaggccaaggcgggcagatcacctgaggtcaggcgttcaagaccagcctggccaacatggtacatggtgaaaccccgtgtctactaaaaatacaaaaaaaaaattagccgagatcgtgccactgcactccagcctggctgacagagcgagatcctgtcaagggagactacggtgtgtgagcctggccaagtcaggcaatcctttgggagagagggcttagggcttcctgggatcagagattctccctgctggcctcagaagcagcagccaccgtgatctccacaggtgcaagactacaacttctgccaccaaccacgtgagcatagaggagggaccgcccccagccttccataagacgctagccctgggcaaccccttgaatgcaggctcaagacagaccctgaagcccaacagccctctccccctagctcagccatgctggactcctgacccccagaaactgtgagaggagaaatgtgtgatggctgagtgtggtggctcatgcctgtaatcgcagcactttgggaggccaaggcaggaggatcgcttgagcccaagagttccagaccagcctgggcaatatagtgagaccctgtctctacaaaaactttttgttttttttttttgagacggaatctcgctctgtcgcccaggctggagtgcagtggcgctatcttggctcactgcaagctccacctcccgggttcacaccattctcctgcctcagcctcccgagtagctgggactacaggcgcccaccaccgcgcccggctaattttttgtatttttagtagagacgaggtttcacgtgttagcgaggatggtctcgatctcctgacctcgtgatctgcccacctcggcctcccaaagtgctgggattacaggtgtgagccatgcccagcctacaaaaactttaaaaaacagctgggtgtagtgacatactcctgtagtcccagctactcaggaggctgaggcaagagtatcacttgagcccaggaggttgaggctgcagtcagccgagatcaccccactgcactccagcctgggcaacagagtgagaccccctttcaaaaaaataaacatgaaagactgcctggtctcgagctgccgagtctgtggccgctcattatgcagtgccactgactgatacaccgagccggggcccaccctgcccgtgggggagggtgcccaggctcccacctgagtgccgtgagctccaccttctcatggtcgttggtgacgagctccgggatgaggctgaggtgggagatctgtgtggaggcccagccaaactggaagatcacgatgaacgggccgtagtagaggagggcagcccactcgggcgtggccgccccacagcccaggcaggggctgaagatgaaggggaaggacagcaggacgcagacggtgcctgtggaaggcagagtggtcagtcgcggggctgtcccgcaccagccagggctcccagggtgaggacatggagggaggagagagggaaactgaggcacagatggagacgccccccgcatgcacacagtcacgcaggagcgagggtctgcagtcggggtcccccaggcttatggcccctggtgacaaaaggggaatctgacaccaggtgcctgggctcagcctgcaagtcagaagaagccaggcgcagggggtcccccggaaacctgccccccacaggtgccccggttacagccgcagcctcccccagctcctccccctcggccactatcaagcctcccatagggcctcggggagcgggaggcccaggtgggcctgggctggacccctccttaagctccgccatcctcatcagctcctaaggtgaccactccctggaatgctggggcgtcctggcctccagggacagtcaggaaatagcacccgcccccacctgagatctgcggtggcaaggcctggctcttcacatcctcagaagaaaacccctaagataccctggaacaaatgtaagatcctccccgcagcccacggagccctttgcgacctgccctgtcccctccgtgccctgccctgcccttccctctctcccccttctctctctgctccagccatgcaggtctcctcactgcaggacctcttcaacatgccaggcggtcctgcccccgggcctttgcatgggcgtgcctctgcctagagctctctctcacatcttagcaagactggctccttttcacctctgggctcaacgggaatgtcacctcctcgaacacctctctcctggcccctgctgcctctacctcacccttcggagcacccgggaattctctgtctgccggcttcctgccggctttcctctgcagacagcagcctccaaggggcctggggagacccagcatggaactcgggcatttcaatatctattttttttttttttttagacagagtcttgctctgtcgcccaggctggagtgcagtggcgagatctcggctcgctgcaacctccgccccctggattcaagccattctcctgcctcagcctcccgagtagctgggactacaggcccatgccaccatacccagctaatttttgtatttttagtagagacagggtttcaccacgttggccaggctggtctccaatgcctgacctcaggtgatccacccgcctcggcctctcaaagtgctgggattacaggcgtgagccaccgcgccccgcctttttttttttttttttttttttttgagacagagtctcgctctgttgcccaggctggagtgcagtggtgcgatctcagctcattgcagcctctgcctccctagctcaagccattctcccacctcagcctcccgtgtagctgggattacaggtacctgccgccacatcccaccacatccagctaatgtttgtatttttggtagggatggggtttcaccacgttggccaggctgaagtcgaactcctagcctcaagtgatcctcctgcctcggcctcccaaagtgctcggattacagacttgagccaccataccggctgttacttcagtatcttctgagtgagtaacaatagtggccctgacacagcctgtaagcgtgggtgtcattatcctcattttccagatgggaaaattgaggcccctagagtgagtcggagccaggctccttccctgcagccctgcactcctctcctcccagcctggggcacctggaagggcccctgtaccaagcctggtggctggacctccttcctccctccggaggtgacctcatccccagaccctgggcccgcccccagagaactggaattgggaagtgaaaccaaaaccagcctctcctgctggtttctctggaactagggcctgggagggtttgcgcagattcctggggtccttggggaggtcatccgggggcagagcatgaactgtggactccagtgagaaggtcccttcctggctggactccctgttcctgctggccagtctgggttaaccattgttggggccaggctgcctggcctggggacctcgggcaagtgactgtgcctctctaggcctcagttttcagaaaacagggatagtggccaggagtggtggatcatgtaatcaatcccagcactttgggaggctgaggtgggaggactgcttgaacccaggaggtcgaggctgcagtgagtcgtgatcgtgccactgcgctccagcctgggcgacagagcgagaccctgtcaagaaaaaaaaaaaaaggccgggcgcggtggctcacgcctgtaatcccagcactttgggagaccgaggcgggtggatcatgaggtcaggagatcgagaccatcctggctaacatgatgaaaccctgtctctactaaaaatgcaaaaaaaattagccgggcgtggcggcgggcgcctgtagtcccagctactcgagaggctgaggcaggagaatggtgtgaatccgggaggcagagcttgcagtgagactccatctctcaaaaaaaaaaaaaaaaaaaaaaaaacaatgaaaagaaatgaaacagagaaagaaaggaaaagaaaagaagaggctgggtgcggtggctcatgcttgtaatcccagcactttgggaggctgcagcggatggatcacctgaggtcaggagttcgagaccagcctgaccaacatggtgaaaccctgtctctactaaaaatacaaaaattagccgggcatggtggcacgagcctgtagtcccagctactcgggaggctgaggcaggagaatcacttaaacccaggaggttgaggttgcagtgagctgagatcacgccactgccttccagcccgggtgacaaagcaagactccgtctcaaaaataaaaaataaaaataaataaaaaattaaaaaaagaagagaaagaagggtagtgaaagttcctgcccatggccaggcgtggttgctcacacctgtaatcccagcactgtggggggctgagacaggcagatcacttgaggtcagcggttcaagcccagcctggacaatatggtgaaaccttgcctctactaaaaatttaaaaattagccggctttggtggcacgtgcctgtaatcccagctactcaggaggctgacgcacgagaatcctttgaactcaggaggcgaaggttgcagtgagccgagatcccgctactgcactccagcctgagcgacagagtgagactctgtctcaacaacaacaaaacaaaaaaaaaaaaaaaagaaagaaagttcctgcctcacaggctgctgtgaggatagagttcatgtgtggcaccagcaaaagctccgtctattctgaaccacttcctgcttccgcagcttcaaagtgaggactgttcctaccttttccacagctgtttctgctacttggaatgcgcccctccacacactgctacccatccgtcaaaacctcaaagttaatgtccttccttctgaagcccatttgtgccatctgcccactcacaggagtgtttgtgtctgattctgagggtcgtctcgggattgtgggggagctccccaggacttgttaaagggcaaagtgagtccttagccaccagccccagacttgggggtgaaatacagaagtgggtgccattgccagggtaaccttcactcaagtcacctgctcaggcatcaagagcggctgcctgggcttctgctcccaacagaccctcctgaccctccaggcccacccaggtggcccccacctctcagctcccagggcaggtgccctccccgaggcggggaagaggggtgacggtggacgccttggtgtccggttggaccacctggttccctgaggtctgctttggaaaaacataaagccttcggttgctgtttctgtttgttttcttgttttggtttgttgttgttgttttttgtttttttagacagactctcgctgtgtctggagtgcagtggcgcgatcttggctgactacagcctctgcctcccgggttcaaacgattctcccacctcagcctcccaagtagctgggattacaggcgtgcgccaccacgctcggctaatttttgtactttagtagagacggggttttgccatgttggccaggttggtctcaaactcctgacctcaggtgaggaggcctcccaaagtgctgggatgacaggggtgagccaccgtgcccggcccgcccagaaattatcttacgcgactgtcaaagagcttatccaactattatgatcaaagaggcatttggggccctgggctccgctcagcaaccaatcccaacgtaaccacaaaggaagggacagccggtcccctccctgtctgccgccgcctcaggtaccccaggaatagcctggacataggaaacatgaaactccagtccccaagctgtgcctgctgcggagcctgccaccctcagaccactggagatccactgcctcttgcaaaaaatgtcatcacccagatcctgggtccaaccacccatcccagtcattgttcccaagggtgaggaggcacccgcctgcccctcctgccacctggaattccaagaactgagcaggattcctggccctgcctgctgaaatgccacatgtgtcccaaatgccaggacgcagccggcacttctgtgagggcaagaagagcagggaaggaggccggctaatcttcaggcccagggtccgggaggggagaggagggccgctgggaggcagccctgcagtcttatcgatgggcactggggcagggtgacccagcccatgacgccagcctcctgccctcccaacagccctctctaatcagggcagctcccccagacctagggggtccctgaccctggccagacagatagaggcaatgcaagaacagggcagagacccctgaccctccagtcccacccaggcggctcccaactctcaactcccggagcagcaccctcaaactgctgacgcaccaggttgccctggcagaacacacagagagagaggaggctctagggggcctgactgtccctcagccatagctgtcccagttggtcaccctaatagacgagctcaggctagacagactgacaaaggaggcgctgagcagtcaccaccaaccctccagagggttcagggtggcccgggggctcagacaaacaaaggcattcccactagaaagtcatgtagtcagatggtgagggccccgcaggtcagacagcagctctgaggcagacaggggaggctggaccaagggacagacagaggggatacggggcagttaaacagacagatgggggaggctcatggctcaggcagatagagaagccctgcacagttggacagatgggggaggcactgcacagtcagacagatgggggaggcacagcacagtcagacgggggaggctcaggccatggggcagaaagacgggggatgctggatggtgggacaggcaggggaggctcaggagtgacaccacagaggggccactgggtagtcagacagacgggggaggctcaggccacggaacagccagaggggtgaaaactcagctcatggggcagacaaacaggggagacttaggtcccaggcaggcagagagagggggctgggtggtgggactgatggaggaagctcaggccatgggcacagacagacagacaggggaggttcgggccaggggacagacagaggggtgaaaactcagctcatagggcagacagatacataggggaggttaaggccgtggacagacagtgcagggaagctcgggccacgggacagacagaccgaggggagactccgatcctgaggcaggcagacggcgggtggtgagtcagagggaggaggcgcccgggtcgcggagtctcggaggggctgcccgacaggtggcggggccgggacgcttaccgaccaggtgccaggccttgcgcgggccgtagcgggcgcagcagctggcggcgcggtcggcctcgtagcccacgagcggtgtgcacagcccgtcggccacctggcccagcagcagcagcagccccgcgccgcgggagctgtaggcgcgcaccgagtgcaggtagagcagcaggtaggtgaaccacatggacgcgcacaggtcgttgaggaagtggcccacggcgtagctcagccgcgccaccagggacagcggccgcggggacggcgccgctccggccgctgggggtcccgggcccatcgcggcgccgggcccgcgccccccacccccgggctccgcggagggtaccctggccaggccttcttgggtgccgtgggggcaggcgccggggacccccaccacgcgccgggcaccccgcgtcccgctctcttacggccgcgccctcacccacgtccgccgcgtccgccccacgctcgactctgcagccgccgggccccagagccgggcgactgcgccgggcggggcagggcggggaggttccggtgcctgagccaatcggagccgcgccccggggaaccgcagccaatcgccaaggagagaggagaggggcgtggccgcagggctcgttccgcctctacgacgggcgcccacgcggtcctagcgcccgccgggtatgagggcgaaccccgagcgcgccgcaggagtggccggcacccccatagactggggaaggaaatggaccagagggcaccgccggctcccacccagacccggcctccaggcccgcaccaccccagtccacccggagctggacagcccactgcgggccggggtggagcgagtgggacgggctctggatttggggttggggggaggtctgagcccgagctggcctcggggtccgctgactccccggcctagagagacgcgatcgggcgcggagaggacgcaacaacactaattaattggttactaacggtaatgatgggggtaatcaacataatagtaccagctggcctttaacgagcgttgcctgcaaagagccccacgtggtgacgcaaatttcactctcattttacaggcgaggaacagagttgcccgaggctcgcagtgagtcaggcgtctgtgactcccaggcctgtgcgcgcgaccctccccgtccaaccaacgtcctcccacaaacgggtcaccggactgagggtttcaagttcctccagggggtgtgtgcggttccccctaactcaggccctactccttccagcagcattttctcttctttcctctttttatttatttcagaaacagggtcttgagacgggcgcggtgactcacgcctgtaatcccagcactttgggaggccgaggcgggcggatcacctgaggtcaggagtttgagaccagcctggccaacaaggtgaaacccgtctctattaaaaatacaaaaattagccgagcgtggtgacaggtgcctgtaatcccagctactttggaggctgaggcaggagaatcgcttgacccaggaggcagaggttgcagtgagccaagaccgcgccattgcactccagcctggataacaagagtgaaacgccgcctcaaaaaagaaagaaagaaagaaagaaacggtcttgctctgtggcccaggctgcagtgcattggtgcaatcatggctcactacagcctcaatcttcagggctcaagtaatcctcctgtctcagcctcccaggtagctgggactacaggcacgcatcaccacatgtggctaacttttgtatttttaattttggagagacagggtctcactatgatgcttaggttgacctcaaactcctggtctcaagcaagcctcccaccctggcctccagaagctctgggattacaaacatgagcctctgcatcgggcgggtctccagcagttttctttctttctttctctctctctctctctttttgagatggagtctccgtctgtcacccaggctggagtgctgtgttgcaatctcagctcactgcagcctctgcctcccgagttccagcgattctcctgcctcagcctcccgagtagctgggactacgagcacccaccaccacgcccagctaatttttgtatttttagtagagacggggtttccccatattggccaggctggtctcaaactcctgaactgaagtgacccacccgccttggcctcccaaagtgttgggattacagtcacgagccaccgcgcccggcctacagcagtatatttggccttgcagtctgcagtgaggtatgattgcaccactgcactccaacctgggcaacagcaagaccccagctctaaaacaaaacaaaacaaaacaaaaggtccttgcagtatggaaggagaatcgttggatccagacttggttccactgattctctgctgctccacttgggacaagtctttttttttttgagacggagtctggctctgtcgcccaggctggagtgcggtggcacgatctcagaacactgcaacctccgcctcctgggttcaagagattctccttcctcagcctgctgagtagctgggattacaggtgcccgccaacacgcccggctaatttttgtaattttatttttattttatttttttttttttttgagacggagtctggctctctcgcccaggctggagtgccctggcgcgatctcaactcactgcaagctccacctcccgggttcacgccattctcctgcctcagcctccggagcagttgggactacaggcgcccgccatcgtgcccggctaattttttgtattcttagtagagacgggggtttcaccgtgtgagccaggatggtctcgatctcctgaccttgtgatctgcccgcctcggcctcccaaagtgccgggattacaggcgtgagccactgcgcccagcctgggacaagtcttttaacctcttggagcttgggtctcccctgatctagaacgggtacaggagttatataattggcctgccatggtggctcatgcctgtaatcccagcactttgggaggccgaggtgagaggattgtttgatcccaggagtccaagaccagcctgggcaatgtgctgaaaccctatctctataaaaaattttaaaaattaggccaggtgcggtggctcaagcctgtaatcccaacattttaggaggccaaggtgggcagatcacttgagctcaggagttcgagaccagcctgcccaacatggtgaaaacccatctctactaaaaatacaaaaatagctgggcgtggtggctgtgcctgtaatcccagctacttgggaggctgaggcaggagaatctcttgaacctgggagggctgaggttgcagtgagctgagatcgcaccactgcactccagcctgggcgacagagcgaagatccgtctcaaaaaccagaacaaaacaaaacccaaggctcaaacagccaaggggtccacggccccggctgcccacggtgatgcaggtcacacactgttttatgaaaactagactgaaaatgggcgggaggggtaaaagaggtcaagacacagaacctagaaaggaaggaggagagataaggggcagacgactcggggagataaagggttgaggagagataagaacctcaattccttcctctctgtttggcacgttcccacttagagtcctcctggcacgttcccctttagagtcctctgagggaaatgaaagatgactttttgaaatattagcctagggaccagggatcctggctcccgcctgtaatcccagcactttgggaggccaaggtgaaggggtcacttgaggtcagcagttcgagaccagcctggccaacatggtgagacccccgtctctactaaaaatacaaaaattgggccaggcgcggtggctcacgcctgtaatcccagcgctttgggaggccaaggcgggtggatcacgaggtcaggagttcgaaaccagcctggccacgatggtgaaaccctgtctctactaaaaatacaaaaattagctgggcgtggtggcgggcgcagataatcccagctactcgggaggctgaggcaggagaacggcttgaatccgggaggtggaggttgcagtgagctgagatcgtgccgctgcactctagcctgggggacagaccaagaccccatctcaaaaaaaaaaaaaaattacagtaattagccaggcgtggtggtgggtgcctgtaacccagctactccggaggctgaggcaggagaatcgcttgaacccagaaagtggaggttgcagtgagccaagatcgcgccactgcactccagcctgggcgacggaggaagaccctgtctcaacaacaacaacaaaattagccaggtgtggtggtgcacacctggagtcctggctactccggaggttgctgtgggaggatcactgaagcccaggaaacgaaggctgcagtgagctatgatcgcaccactgtgctccagcctgggtgacacagtgagactcagtctcaaaacaaaaacaaaaaaactaatgtttttcccattcctcatctcctttcatcccacaagatccctaggaggtcttacaccacttcatgctctattattttattttattattaatttttatttttagagacagggtcttgctctgtcacctaggctggagtgcagtggtgtgaccacagctcactgtagccttggcctcccgggctgaagagatcctcctgcctcagcctcttgagtagctgggactacaggtgcctgccaccacacctggctaattttttcagagatggaagtcttgctatgttgccctgactggtcccaaagagatgggattacagacgtgaggcacagtgtgcagccttcatgaccccctccactgccttttcttgttttttttgagatggagtctcactttgtcgccaggctggcgtgcaatggtacgatctcggctcactgcaacctccacctcccgggttcaagcgattctcctgcctcagcctcccgagtagctgggattacaggcgcccgccaccacgcccagcttatttttgtatttgtagtagagacgggatttcaccatcttggccaggctggtctcaaactcctgacttcaggtgacccgcccgcctcggcctcccaaagtgctgggattacaggtgcgagccactgcgcccagcccttcatgcctcttttacagataaggaaactgagtttcacaaagacgggcatgggcatgggactgtggcgggcatgggactaacaagaggcagatgtgggatttgaactcagctccacgtgacctctttatgtgctggctgcggaatgccacctgagtgtggaggaacaggtgcctcactgtccactgctttttcagcctcctttgtaggtcgagaatcaggcacaatcccgcctccctttggagaagatccagcggaggaggcagggtgtggttaaagcgccaacacatctctgcattcttgtccttttgctgttgtggtggttgttgtttgagactgagtcttgctctgtcgcccaggctggggtggagtagcacgatctcggctcaccgcaacctccacctcccgggttcaagcgattctcctgcctcagcctcccaagtaactgggcttacaggcacctgccaccacgctcggctaattttttgtattttttagtagagacggggtttcgccatgttgctgtttcgccatgttgtgggtcggttctcgaaattcctgacctcccaaagtgctgagatcacaggcatgaatcaccatacccaacgtagtttttttgtttttgtttttgaagacagagtcttgctttgtcacctaggctggagtgcaatggcgcagtctccgctcactgcaacctctgcctcctgggttcaagcagttctgtatcagcctcccgagtagctgggactacaggcgagcgccaccacccccagataatttttgtatatttagtagagatggttttcaccatgttggccaggctgctttcgaactcctgacctcaagtgatccgcctgccacagcctcccaaagtgctgggattacaggcgtgagccaccgcgcctggccacccaaagtatttttgtttgtttgtttgtgacggagtctcgcctgtcgcccaggctggagtgcagtggcgccatctccactcactgcaagctccacctcccaggttcacgccattctcctgcctcagcctcctgagtagctgggactacgggcgcccacgaccacgcccggctaattttttgtatttttagtagagatggggtttcactgtgttagccaggagggtctcgatctcctgacctcatgatccccctgcctcggcctcccaaagtgctgggattacaggtgtgaggcactgcgcctggccacccaaagtatttttaaattttttgtagagatgaggcctcatcattttgcctaggctggtcccgaccacctggcttcaagtggtcctcccggctcagcctcccagagtgttgggattataggcatgagcctcggcacctggcctctgtttttgtccctttgaagccagctaatatttcctagccctgactttgtggggtgagcaggaactaggtctgacctcttgctgaggagccccaaagattctgaagcccctgcttttgaggggagacagggatgacccctcccagttcccctcatcagggacaggactggaggagtcagaccaagaagggcggttacaaggtaggtgaggagttgggacattaccctgaggtcactagggagccatggtaggggttagagggagggtgggactgagtcagattaaaaagtccagtgggagatgaggaagggcttcttccaaatgaaggcctcagctgcgtgcgtggggaagccacaggagaggacatgtgccccaacaagagtgggggttggacgtgagggtaaagatcagagaaggccctgtctagagatgtcaggaaggcatgatgaaagctcaggccctcggggtaggacagaggagtcaggagagatcctcacagtctgatgtccccagcccatcaccagcagccccctgacgccaagcctgcgttccccctcccctggccggacatcggatgtcctgatggccgcagtccagcctcggggtggggtggggaatgtcaagtactagaggcttccttgatcttctgtgacccaggcctggggtgacagaggtgggggggtgggcagtgagggttcctgaggctgcactgaaacttccttatatctgagggtggccacggtggaggcgggggagcaggggagcaaagccaggatcaaatctgggcagtccctgacaagccaccaagcttcagttgccctctctgtaaaatgggggtgaggtgagagtaaccgaaccaaacagaataccaggaggcttcaaccacacaacttggccgggcgcggtggctcacacctgtaatcccagcacttagggaggccgaggcaggtgggtcacctgagatgaggagtctgagaccatcctcgccaatatggtgaaacctcatctctactaaaaatacaaaaaattatctaggcctggtggtgcatgcctgtaatcccagctactcgggaggctgaggcaggagaatcacttgagcccgggaggcagaggttgcagtgagccgaggtctggccattgcactccagcctcggcgacagagtgagactccatctcaaaaaaaacattagctgggcatggtggtggccacctataatcccagctactcgggaggctgaggcaggagaattgcttgaacctgggaggcagaggttgtggtgacctgagatcgcgccattgcactccagcctgggcgacagagtgagacccagtctcaaaaaaaaaaaaaaaaaaaggatggggagggagggaaggaaggacgaactctttttttttttttttttttttttgagacggagtcttgctctattgcccaggatggaatgcagtggcacgatctcagctcaccacaacctcctcctcccaggttcaagcgattctcctgtctcagcctcctgagtagctgggattacaggtgcctgccaccacgcctggctaagtttttgtatttttagtagagacgggggtttctccacgttggtcaggctgctctctaactcctgacctcatgatctgcccgcctcgggctcccaaagtgctgggatgacaggcgtgagtcactgcgcccggcctcttcagtcagtctttgcgtgactcagtctttgccaggaccctcctggcctcaggtcctgttcagtatctggtctaccattgccagaaggagcgcattctgtgagtcttgtgatttacgttttaacgttgatgctggtcagtccttgcgctgagagcaaaacggggaggagctgtaacgaagcgcggtgacctcctggcacggcagggcctggaactcggagctttttgttgttgtgttgtgttttgagacggagagtcgctctgtcgcccaggcaggagtgcaccggtgcgatctcagctcactgcaacctccgcctcctgggttcaagcagttctcctgcctcagcctcccgagtagctgggagtataggcgtgtgccaccacatccggctaagttttttgtctttttagtggagatggggtttcgccatgttggccaggctggtctcgaacccctgacctcaggtgatccgcccgcctcggcctcccgaagtgctgggattccaggcgtaagccactgtgcctgaccaacctcggtactcctgacgtttgggacatcattttttgtggtgggggccgtgtaggatctctggcctcaaccgtgtagatgccagtagcacccccctagtccgacaatgaaaaatctctctagacattactaggtatttcctggcgtgacagagttggccccggatgagaaccactgagctagagcgttttctgtaacaggtgtttgattctccctggacaatcccagccagcaacgtcataaaggtagacaaagcaattatcccacttaacagatggagaaactgaggcacagaagttgagtaaattgcccaagtcccacagttgaggctcagattgcttccctgagttcctgagggcccagcagcagtggggtgcccctcctcagaggcctgagatccctgtcccaccagccctgtgttctgccagccccggggccaggggatgctaggggcagtagctctctttccgcttccctgtcgccttctcagctctccagcatctgtttaagcaatgcctgtatgaagttgcctctataaaaagccccaggaggcttgagattgtccgtggcctgggagaaccaaccacaccctgactctccctgggtggtggagaaaagtccacacatccatgttgattaatatctattaaaaatttaaggtcaggcgcggtggctcatgcctgtaatcccagcactttgggaggccgaggcgggcggatcgcgaggtcaggagattgagaccatcctggctaacacagtgaaaccccgtctctactaaaaatacaaaaacttagccgggtgtggtggcgggcgcctgtagtcccagctacccgggaggctgaggcaggagaatggcatgaacccgggagacggagcttgcagtgagcagagatggcgccactgcactccagcctgggcgacagagagagactccatctcaaaaaaaaaaaaaaaaaattaatgggggcatgtaatcccagtactgtggtactgtggtactgtgggaggctgaggcaggaggatcacgaggccaggagtttgagaccagcctggccaacatggcaaaacctcatctccactaaaagtacaaaaattagtctcgcatggcgatgtgtgcctgtaaccctggctactctgaaggctgaggcacgtgaatcacttgaacacgggaggtggaggttgcagggaggtggaggttgcagggagctgagactgagccactgcactctagcctgggagctgggcaacaaagcaagaccccatctgtacgaaaattaaaataatcagccagatgtggtggtgcatacctgtggtcccaactgctcgagaggctgaagcaggagaatcacttgagcccaggagttcgaggttgcagtgagctgagatccgatgactacactccagcctgggtgacacagcgagacaccatgtctcaaaaaataataatagtaaaaaataccctttatctgagcgatattattgagtaaacagaactggttgcagttgaagcttacagcatgaaggcactggtataatacacagcagaataggacctcacatttgtttgcttacttttattattatttttttttgtagagacagggtctcactatgttgtccaggctggcctcaaattcctgggttcaagcaatcctcctgcctcagcctcccatagtgctgggattacaggtgtgagctactgcacctggccaggacctcactttatttatttatttatttttttgagacaaagtctcgccatgtcgcccaggctggagtgtagtggctcgatcttgactcactgaaacctctgcctcccaggttcaagcaattcttgtgccgcagcttcctgagtagctggagctacaggtgtgcaccaccatgcgtggctactttttgtatttttagtacagacagggttttgccatgttggccaggctgttcttgaaatcctgacctcaggtgatcggcccactttggcttctcaaagtgctgagattacaggcgggagccaccacgcccagcctatatttttatttatttatttactattttttgagagggagtctcgctctgtcacccaggctggagtgcagtggcacgatctcagctcactgcaacctccgcctctaggttcaagtgattctcctgcctcagccttctgagtagctgggactacaggcgtgcacccccatgcccagctaatttttgtggttttacttttttgtagaattttttttttaactgtgaatacacattttttatttggtcatttttgcttacaattgaaactctgggaattcaaaattaacatccttgcccatgagcttcttatagacaccagaaaaagtttcaaccttgtgttccatattgttctgctgtgccttgtccaaatgaacctttatgagccggctgccatctagtttcacgcagattctctagagtttcaactgtaagcaaaaatgactaaataaaaaatatatattcacgttaaaaaaattttttttttttttttgagacggagtctcgctctgtcccaggctggagtgccgtggcgggatctccgctcactgcaacctttgcctcccgtgttcaagctattctcctacctcagcctcccaagtagctgggattacaggtgcccgccaccacgcccggctaatttttgtatttttagtagagatggggtttcaccatgttgaccaggctggtctcgaactgtggacctcgtgatcctcccacctcagcctcccaaagtgctgggattacaggtgtgagccaccgtgcctggcaatttttgtgtttttagtagggacagggtttctccatgttggccaggctggtgtcaaattcctgacctccagcgatccacccacctcggcctcccacagtgctggcattacaggcgtgagccaccgcgcccagcccacgtctttattaggaatacgcacatgtgtacgtgtgtaggcatgtgctgtgggtggagtcatgtccccacagaatgcacaggttcctgtcctaatccccaaggcctcagaatgtgaccgtatttggaaaaaggtcattgcagatataatgagttaagatgacatcattagggtgggccgtgacgcagtatgactgctgtccttatcaaaagaggaaatttgggtgcagacacgcacatagggagaaccccacatgaagatgcaggcagacatcggggtgtcactcctacaagacaagaaaagcccaggattgctggccaatgccagaaactgggagacgccagggacagattctctccccgccctcagaaggccccagccctacccacaccttcctcttggacttctggcctccagaactgtgaaacaataaatttctcttgtttaagcccctcagtttgtcgtaattattacctagcaaaccaatgcagtgtggtgtgcgtgtgtgtgtgtgtgtgtgtgtgtgtgtgtgtgagtgtggctaggaaaaattttaaaaagagatgcggccgggtacagtggctcacgcctgtaatctcagcactttgggaggccaaggtgggcggatcatctgaggtcaggagttcaagacctgcctggccaacatggcaaaaccccgtctctactaaaaatacaaacattagctgggtttggtggcacgtgcctgtaatcccggctactcaggaggctgaggcaggagaatcacttgaacctgggaggcggaggttgcagtgagcaaagatcacgccactgcactccagcctgggcgaatgaaactctatctcaaaaaaaaaaaaaagaaaaaaaaaaggcctggcacagtggctcacgactgtaatcccagcactttgggaggccaaggcgggtggatcacaatgtcaggagatcgagaccatcctggctaacacggtgaaaccccatctctactaaaaaatacaaaaaaattagccgggcgtggcagcgtgtacctgtagtcccagctacttgggaggctgaggcaggagaatggtgtaaacccgggaggtgaagcttgcagtgagccgagatcgcgccactgcacactagcctggacgacagagcgagactctgtctcaaaaaaaaaaaaaaaaaaaaaaaaaaagcaataagctgacgataggaaatgtaatgaaattaaagaggtctgagctgcacttccttaattctgtacaagtgaaatggatgtgaacatgatttgcataataaaaattaattagaaaaccaaagaattataaggcaagtcatccttaatggagagcttccacctctaggattataaattggtatactgttcctggcttcatgctataaaaactggcaaataaatcatagtaataaatgacaaaaaacaaacaaaaaggccgggcgcagtggcccacccctgcaatctagcaccttgggaggccgagacgggcggccacctgaggtcaggagttcaagaccagcctagccaacatggtgaaaccctgtctctactaaaaaaaaaaaaaaaaaaaaaattagccgagcgtggtggcggatgtctgtaatcctagctacttgggaggctgaggcaggagaatcgtttgaacccgggaagcagaggttgcagtgagccgagatggtgccactgcactccagcctgggcggcagagcaagactccatctcaaaaaaataaaataaaataaaataaaataaataaacaaaataaaataaatgttcaattaaattgttattgactatggccgggaggggtggctccacacccagcctcacctagactatttttaagtgagcagagagacacaggggaggcctgggaggtcagagagctgattaagcaacagagccaggtctggcgtgtggaaccgtccagattccagggccagctcctcttcctcagccccgggctgcatcttaggacaatgggcttattgagacttaactcacatataatgcacccatttagagcatacaattccatggtttgtaatatatttccagagtcacgcagccatcactgaaatcaaattgtaaaatactttcatcacccaaatgaaaaccgcatccctctcagtggtcattccccacccactggcacccacacgtccccctcctgtctctgtggatgggcctttcctgaacattctgatcacacactgtgtgacctttgtgtctggcgtctctcactgagtgtgatgtcttctaggtacatccatgctgtgacttgtgtcagagactcgctccttttttttatggctgataatattctttttttttttttttgagacgtagtcttgctctgttgcccaggctggagtgcagtggcacaatcttggctcactgcaacctctgcctcccagttcatgggatcctcctgcctcagcctcccatgtagctgggattacaggcgtgcaccaccacgcctggctagtttttgtatttttaatagaactggagtttcaccatgttggccaggctggtctcgaactcctgacctcaagtgatccgcctgcctcccaaagtgctgggattacaggcgtgagccactgcgcccggcccatggcggataatattctgttgtaaggatatatcccgtcatcgatccatgcatcattagcagacgtttgagttgttttcactttttggctattatgaatcacgctgctaccgacgcttgtgtacacgcttttgtttgaacacctgttttcagttgtctggagtatattcctaggagtgaactgctgaattgcatggtgattccacatttatttaaccctttgaggaaatgccagtctgttttccaaagcagctgcatctgcctcctagacatctgaaggattcaatgaatgtgtattgagcatccaccatgggcaatgctgtgaaccaaacaggcaggccacagggagaagccgacttatggaggcaaaaaaaaaatcagagaaggcctggctgagcaagtgacatttaagcggacttgaggaagaggaagtgggccgggcgtgggggctcacgtctgtaatcccaccactttgggaggccgaggcgggtggatcacgaggtcaggagttcaagaccagcctggccaagatggtgaaaccctgtctctactaaaaatacaaaaattagccgggcgtggtggcaggcgcgtgtaatcccagctactcgggagggtgaggcagagaattgcttgaacccgggaggcagaggttgcagtgagccgagatccagccactgcactccaccctggacgacagggtgagactccgtctcaaaaacaaaagaggaggtgagcagccccaacttgggccagaagcctagactgctgctgggaggtccctgatccaccagagcggagcctcctgacccatcctcacgaagtccttgccatctcccttcaccaccatctttccccaaacacttccagcccagctcccaaccccaccccctgcctgacccacacccagttctcagcttcccagcatcccagtctctctgtcctggatatcgtgtgatgtccccgttgcacaggggggaaagccgagaccccagagggagagcagcccctatggccagaagccctcggatccggacgtcgggggctctaaactgagtaaatacataggaaacttctccgctaggttttgcaggatgttaagaacaggtcccaccttgcctagggctggggactgcctcgcaggaccttaaccctagcaacccacctccgtccccatggcaaccggggcggggcccgacccggatccgccggtcgccccatccggcagcggctgggagtcttgccttcagagagggaggaggagtccgcgcctctcctactggccctttaagaggctccgcccggcaagtccgccactcgctcccgattggtcccgagcgcggccgagcgcagccgaacttgacgcaccgcccgcagccttccttaccaacctcccacgcgactcagcaacctccccaaccaatcgccggccggcgcgccgatcggtatctgcatgggctcgcccggggggaaggtctcacccaatgggaccgttcgccgaggccttcattagcatgccgggggcggggaggggcggggcggccgacgggggcgggctgcgggcggttggttggagcgtcgcgcagtcgggaggtccgggaaagtttctttggaggtgaaaacagccgcggaactccgggccctgagagggggcgggggtgcaggggtcccagggccgggccggggtctttcctggcccgggggaaaccggcccaggcctcccggggggggcaatcgcccaacaaaggattcttggggcgcccgccctcgaggacttccctgcccctggatccggcccccccagcgctccgggcccggcatcccggggctctccatcgcggggtaccccagttcgcggtctgccatcgggcagcccgggcgctactcacctccgcccgcgtccgtgttccaggtccggcccggagcggccatgtcccacggccccaagcagcccggcgcggccgccgcgtgagtgcactgatcccctccccacgccctcgctactttcccggctgcagccctagctcctgaacccctgacccagtccctcccgccggagtcttgactcccccacctgggtcagggggcttctccctccacccaattctgcaccccccacctcggcctccagtccctcccaggagccccgcttgtcccaccttccccggatactgaccccatcagaccctgcctcctcgggctcatgcactctcgctgcagccccgccgtcgggggtcaaaacgccctggggtgggcttttgggggaggggagattcttgggacggggctgaccgcggtatccttggctccaggccggcgggcggcaaggctccgggccagcatgggggcttcgtggtgactgtcaagcaagagcgcggcgagggtccacgcgcgggcgagaaggggtcccacgaggaggaggtgagagtccctgcgctgagctgggggaggccccgggctcccgccccagcctcgaagccccgccccaggctggatttgaattgcttgtggctccgcccacagcccattttcctctggaagctgagaccccgccccgtgccagctgccacgcccctgacaggtcctctgccactctaagtccaggccccgcccaccgcacaatgccagctctgcccactctaaggtcccgcccacttccactccttgggggcggcaccctccccttggtcctgtgggcccgttctccagcagaaaaccacgcccaccaagcagaggccacgcccacaaccgaagtcaacgccaaccctgtactcaaacctcggcccatagttcctcagatcccctcacccctggccagggatccctctaacccaccgtgtcccgactgctgaccgggccctacctccatcttttccgggttcttcctcccagctaggccccgcccccatccccgcccatacgcgttaggccccgcccatgcccctctgagccctgccccagtacgccaggcccccctcccaacgacgcagcccggttctgcagccggtgaagaaacgcggctggcccaagggcaagaagcggaagaagattctgccgaatgggcccaaggcaccggtcacgggctacgtgcgcttcctgaacgagcggcgcgagcagatccgcacgcgccacccggatctgccctttcccgagatcaccaagatgctgggcgccgagtggagcaagctgcagccaacggaaaagcaggtgggcggggcggggcgccgagcagggctggcggggtccacggactaccccccagtagccccgacccccaaaggattccacgtgcagggtttttccttcttcctggagaaatgcccacccataaccaactttttttttttttttttttgtgagatggagtcttgctctgttgcccaggctggagtgcagtggcgtgatctcagctcactgcaacctccgcctcccggcttcaagcaattctcctgtctcagcctctcaggtagctgggattacaggcgcgtgctaccatgccctgctaatttttgtatttttagtagaaatggggtttcgccatgttggccaggctggtctcgaactcttgacctcaaatgatccgcccacctcagcctcccaaagtattgatattaaaggcgttagccaccgtggccagcccatgaccagcttttgggggcgcggctagcaagaggcaagacagattgaaaactggatgaccaacaaagatatgtctaagaagtcaggatggggcctggattttttgcgaaacccgattttcatatcctgttagtttaaaaattgcaaaaacatcacggaaatgtaacaaaagccatcactgctttgcatccctgtaagtgagatttcaaagagagaaacgggtgcgggagggagtccaggcatccgcatacgctggaggttgggttcctgcccatgactctggcgtccgggagtggtttgtcagggctggaggtggggaagagtccggggcatgggaagtgaggtgggagctcggaggtccctgagcaacaggctgaggagccggttctgtctgcctggagggaatagggagctatagaaggttcaggagaggggagggtgctgtgaaagcagagtgataaagactggatcctggcgttggaggcttcccctgcttcaagccttctggtgctgccccccagcggtacctggatgaggccgagagagagaagcagcagtacatgaaggagctgcgggcgtaccagcagtctgaagcctataagatgtgcacggagaagatccaggagaagaagatcaagaaaggtgggaggggtcgggcgcggtggctcacgcctgtcatcccagcactttgggaggccgaggcgggtgtatcacctgaggtcagaccagcctggccaacatagtgaaaccctccccctctactaaaaatacaaaaattacctgggcgtggtggcgggtgcctgtaatcccagctactcgggaggctgaggcaggagaattgcttgaacccgggaggtggaggttgcagtgagccaagattgcgccattgcactctagccagggcgacagggcgagactccgtctcaaaaaaaaaaaaaaaagaaaaagaaaaatgaaaggtgggaggggccggtgcgagcagttggggtcctgctctgtggggtgcgacctcagcccaggcagggcctccctccgtggggcacagtcccgtgggttgggcgggggaaagatacatagccagacaggagtgaagggggctcactcggtacagcgatgggggatgcccagacgcggggcactcaagtggggagctggagccggctgagcagcgctgacctagggtgcagggcgtggtccctggaggcctgggaggctgaccctgcccttcccctcccccgccagaagactcgagctctgggctcatgaacactctcctgaatggacacaaggtaagcgaccttcttcctctcaaagcacctgggggagaaaggtctggaggcttctagaaccctgagtcagagccagtgctcgcccagatgtgtgcaagcaggggcggtgccactgcaccgtgggatcgctgttgattgtactcccaccggggtgtcccaggagaccctcctaggcttggggcacacccagagagcgtggctgcctcctaccaccagtaaattgccaccttgtcccttcgtcttagggtggggactgcgatggcttctccaccttcgatgttcccatcttcactgaagagttcttggaccaaaacaaaggtgagcggtaactgcgctcctgatgcgaactccgtgaaactgggtggtagaggggggcgtgggccaggagggccccaagactgcaggaggcggatcgggaggttccctatgagcgtccaggcgcacgctgtcgctccagaggctgatgtggagcaggaggcagagggcgcagtgagggaaacctgggcaggggcacgtcccgggcaaaagcccggaggtaggggaaaggggaggcgcaggctttgaccccgctccccccggcgcagcgcgtgaggcggagcttcggcgcttgcggaagatgaatgtggccttcgaggagcagaacgcggtactgcagaggcacacgcagagcatgagcagcgcgcgcgagcgtctggagcaggagctggcgctggaggagcggaggacgctggcgctgcagcagcagctccaggccgtgcgccaggcgctcaccgccagcttcgcctcactgccggtgccgggtgcgggccacgcccatctcccagtcccgccccggtcacccggccccgcccgcctccccccccctcctcccttccccccttcccctgtcgcccggcgccgcccatcgccccgtcccctcttccccagtcacccggccccgcctatcgccccgccctcatcacccccagctccgcctcctccccgacccccgcacccctaccccatagctccgtctggttcttcccagaccacacccgagctccgctccgcgccccgttactcggccggctccctgacctcgcccccaccgaccgcgcctcccggccacgacctctcccgacgcgtccccgcttactcgcttcctcccgcagcccctttgtgcccccacccttcgcgcccccaccgctccctaccggccccaccgtcgctggcccctctccctcgccagcccccgaccagcctgagcactgacccagcctccccgctcgccacgccacgttcccattcaccccacctccccacgcccccgtcacccatccctccccacgccccgctgacgcctgagccccctccaccaccccagtcacgtcccacgcgaccccagccccccggtgtcatccccacctccccgacctcgttccctccgtccgtgactgtcctcagcggaccctggacgcccgccgctctagccccgcgtccccaccctgtccccgtcctcgccatcctcctgccccggcttaccttagcccaccctgcgccgctcctgcgctggcggtgtccggacctctgagcgcccgcgcgacccgccctgagtcaccccctaccgctgcccctggagcccccgccccgcgactccccggcaccctcgcctgaccttcccgcctgtcccccaggcacgggcgaaacgcccacgctgggcactctggacttctacatggcccggcttcacggagccatcgagcgcgaccccgcccagcacgagaagctcatcgtccgcatcaaggaaatcctggcccaggtcgccaggtgtgtgccgggcgaggcggggcggggccggggttcaaggcccggatgtgcccgccctggggttccccaggtccgcgagggctgctgggtgggactccgcagcttactagagatcacctcccggaggggcctacctgcggtcgcccctgatgcaccagtgctaggatggccatggagaaccccgggccggcgggacccactcgggggcaccagaacttccctaaagcttctcagggtggatcccagcgcccgggttagataggttcaacgcctgtcccccaaccctggcatctgttggagcagctgatgggccatggtctctggggttccccagggccggggtgggggccagagatgatgagggcctcatcccgggccctcctctctcgtttcagcgagcacctgtgaggagtgggcgggcccacgatgcagaggagaagctgtgggcgcggccctgccacaccccaccccgtggacgagaggctgggggtccaccctttggggcctggtcccatcctgcaccttgggggctccagcccccctaaaattaaatttctgcagcatccctttagctttcaatctccccagccccctgaacccggaaaaagcactcgctgcgcgatacacccagaagaacctcacagccgagggtgcccctcctcggaggacagccacgcgctacactggctctccgggccacccccaggacacagggcagacgaaacccacccccagcacacggcaggaccccccaaattactcactacggggggctgtgccataggccacacaggaagctgccttgtggggacttacctggggtgtcccccgcatgcctgtaccccagatgggtgggggccggctttgcccatcctgctctcctccagccgagggaccctggtgggggtggctccttctcactgctggatccggactttttaaataaaaacaagtaaaatttgtgttttaagcttgtgagtgtgtaagcttgtttggggtggtgtggagggttcagaaggtgcagcctgggccccccatgacattccctgctgggggcgccaggcctgctctctttacctctagcagagcctcagagtttctcagatagggagacgggagcccaaacttgccggggttcacagagcaagtcaatggctgggcaggtgtctccatccctcccctacctaaagttgggcattgtgggctcagcacacgtgggggacttgaagcacaggggacagtcacggctgctcagttcatccttcaacttgtgtccgcacgggggttcaagtccactttgtagcacagtgactttgggtgggccacggttttgtttattgtgtaaaatacgcaacatgaaccttaccatcatagccattttgtttatttattggagacgcggtctcactctgccacccaggctggagcgcagtggcccgatcatagctcactgcagccttgaactcctgggctcaagcaatcctcctgcttcagcctcccaaaccctgggattacaggcgtgagccaccgcgcctggccattttagccattttaaaatgcacaattcagtggcatttagtacatcacaattttgtgcagtcatcacctttatctaatctcaacgcattctcatcacccccagaggaagtcctgtcctcatcaacagtcactctcatcccctccccagctcctggcacccacaaatccccttcctgcctctgtggattgacgtgtcctggatatgggaccacacactgtgtggccttttttttttttttttttttgagacagagtcttgctccgtcacccaggctggagtgcagtggcacgatctcggctcaatgcaacctccgcctccctggctcgagtgattctcctgcctcaacctcctgagtagctaggactacaggcgtgtaccaccacactcagctaattttttgtatttttagtagagatggggtttcaccgtgttagccaggctggtttcgaactcctgacctaggtgatctgcccgcctccgcctcccaaagtgctgggattacaggtatgagccaccgcacccggactatatgtccttttgtatctggcttctctcactgagtgtgattgtcctccagatttatccacgctgtggcctgtgtcagagcctcattccttttggtggctgagtcattgtccagtgtgtggatgaatccgctgtattgaccccatctatctgtcaaaggacacttggctatttctaccacttgtgagtcatgctgctgtgaacattcatgtacatgtttttgttagaatgcacattttccattcttttggagatacagattgctgggagttctgcatttggcttgttttgtgtacgtgtgtgtgtgtgtgtgtgttgcttattgagaaacctttccagggacttctgcgtttaatggcatacataagacatcctaaaaaattcggagaataatctgaaccccagaacctctgaacgtgaccttatttggaaatagggtcactgcagatataattagttaagattaagtcattactggagtagcataggccctaagtccaagatgactgctctccttataagaagataaaatctggacacagacacagagaagagacagccaagtgacaacagaggccgagactggagtgatgtatctagaagccaagaaacgttaaggaaggccacccacagccagaagctgtggatgccaggaaggattcttcccaggggctccgagggccctgccaacaccttcattgtgggattctggcctctggagctgtgagaggataagtttctgctgtgttatgtctccctgtttgtgatgctttgtttttgtttattttttattttttaggggttgggggggggtctcactatgttgcccaggatgatcttgaactcctggctcaagtgtcctgctgcctgggcctcccaaagtgctgggattacaggcgtgagccattgtgcccgcccacctccatcccacactgcttcttcttcttctttttcttttttttttcagacagagtttcactcatgtcacccaggccggagtgcaatggcacgatctcggctcactgcaacctccaccatccaggttcaagcgattctcctgccccagcctcctgagtagctgggattacaggcgcccaccaccatgtctggctaattttttatattttagtagagatgtgatttcaccatgtcagccaggatggtctcgaactcctgacctcaggtgatccacctgccccagcctcccaaagggctgggattacaggcgtgagccaccgtgcccgacagctttttttttttttttgagacagggtcccactatgttacctaggctggagtgcagtgtcgcaatcatagctcactgcagcctcgacctcctgggctcaggtgatcctcccacctggttctcgtgagtagctgggaccacaggtgcctgccatcactcctgcctaattatttatttaatttatttatttatttatttttctgtgagacagagtctcgctctattgcctaggctggagtgcaatggctggatctcaggtcactgcaacctccacctcccgggttgaagcgattctcccacgtagctgggattacaggcactcaccatcaagcctggctaatttttgtattttgagtagagatggggcttcaccatgttgcccaggctgatctcaaactcctgacctcaagtgatcaacccacctcagcctcccaaagtgctggaattacaggcatgagccaccatacccagtcaatttattggtatttgtgagatggggtctcactatgttgcccagactggtcttgaactaccgggttcaagcgatccatctgggccagcctctcaaaacgctaggattacaggcataagccactgcacccagctgtttctttgtggttgagacaggatcttgctctgtcacccaggctgaagtgcagagatgccatcacagctcactgcagcctatacctcctgggttcaagcaatcttcccatctcagcttcccaagtagctgggactacaggtgtgtgccaccacaccccgctaattttgtattttttgtagagatggggtctcaccttattcctcaggctggtctcaaactcctgggctcaagtgatcctcccgcctcggcctcccaaagtgctgggatcacagtcaagagccacctcaccacacccagtttttggtgctttgttacagccatcatgggcgagtcagacaacctgatactgccaacccccctcactccccaccccagtttcaccctgtcctggcacaggtaccaccaccttaaatttagagtttctcatttctaggcaggcctggaaaatagcattttgcagcagttttttattaaaaaaaatttcagtatacaattcagtaggttttggtacattcaaaaagctgtgtgggctgggcacagtggctcacgcctgtaattccagcagtttgggagaccgaggcaggcagatcacttgagaccaagagttccagaccagcctggccaacatagtgaaacccggtctctactaaaaatacaaaaatagccagggatggtggtgcatgcctgtaattccagctacttgggagactgaggcaggtgaatccctctctctctctctttttttttttttgaggcggagtcacgctcttgtctgtcccaggctggagtgcagtggcgcgatcttggctcactgcaacctccgcctcccgggttcaagtgattctcctgtctcagccttccaagtagctgggattacaggcacatgacaccatactcagctaatttaatttttgtatttttagtagagatggggtttcatcatgttggccaggatggtcttgatctcttgaccttgtgatctgccttccttggcctccccaagtgctgggattacaggggtgagccaccagacctggccttttttttttttttttttttttgagacagtctcactctgttgtccaggctggagtgcagtggcatgatcttggctcactgcaacctccgcctcccaggttggagcaattctgcctcagcctcccgagtaactgggactacaggtgtgcgccaccacacctggctaatttttgtgtttttagtagagatggggtttcactgcgttgtccaggctggtctcgaactcctgacctcaagcaatccgcctgcctcagcctcccaaagtgctggattacaggcatgagccaccgtgcccggccttacataaaatttcttacctcgtccaaaccctcctgccactttcttttctctccccatgttcagtttgtgaggctcctcctgggcggaggctgtgactggctctgctgtagggcccgccactgcaggcaggatggctgtttattgagccgacattcctgggtaggaatctgatggatacgtaggtgtttctgacattgcactccagcggatttttaccaacgcctcctggtgcctggggtctcctccttcatctgtgacctggacatccgttcattcctcaccaaagatcactgggcacctgctgtatgccaggcactgtgccctggacactgggcatggggacagagcaggggaacagcccccaccctcctggagctgacattcctccagtcctggggacaaacaggacaaaagatgaaatgaaatatcagcagggggctggggctcaagcctgtaatcccaacattttgggaggctgaggcgggaggattccttgaggtcaggagttcgagaccatcctggccaacatggtgaaacccccgtctctactaaaaatacaaaaaaaattagctgggcatggtggcaggtgcctgtaatcccaactaatcaggaggctgaggcagaagaatcgcttgaacccgggaggcagaggttgcagtgagccgagatcgtgccactgcactccagccttggcaagagagagagactccgtctcaaaaaataaaataaaataaaatatctgatatgtcagatggtagctttaaatgctgaagagaagctgggcacagtggctcacatctgtaatcctagcactttgggaggccaaggctgaaggatggcctgaacctcctggtcttgagtttgagaccagcctgggcaacacagtgagatcccaactgtacaaaaaattaatcatgtttctaaattaaattttaaaaaactgaatgcggccgggtgcggtggttcacgcctgtaatcccagcactttgggaggccaaggcaggtggatcacctgaggtcaggggttcgagacaagcctgaccaacatggtgaaaccctgtctctactaaaaaatacaaaaattagccaggcatggtggtgtgcgcctataatcccagctactaggggggctgaggcaggagaatcgcttgaacccaggaggtggaggttgcagtgagccgagatcacgccattgcactccagcctgggcgacagagctagactccgtctccaaaatcaaacaaacaaaccaaaggctgggcgtggtggctcatgcctgtaatcccagcttttttggaggctaaggtgggtggattcctgaggtcaggagttcaagaccatcctggccaacatggtgaaacctcatctctattaaaaatacaaaaaaattagccgggcatggtggtatatgcctgtaatcccagctactggggaggccgaggcatgagaattgcttgaacctggtgggcagaggttgcagtgagctgagatcgtgccactgaactccaaactgggtgacagagcgagactccagctcaaaataaataaataaataaaaataataaaataaaataaaacaatgacctcgcctagcagagggtgagtgctccagcaccctcagctgtccctgtccttttttttttttttttttttttttttgcgacggagtctcgctttgttgcccaggctggagtgtaatggcgccatctcagctcactgccacctccgcctcccgggttcaagagatctcagcctcccgagtagctgggattacaggcgcccgccaccacgtccggctgatttttgtatttttggtagagacggggtttcaccatgttggccaggctagtcttgaactcctgacctcaggtcatctgcccgcttcggcctcccaaagtgctggaattacagacgtgagccaccgctccaggcctgtccctgtccttatttgtggtccctgttcttccagggtcctgagctcaggcccccccggactgcgggtatccccggggagggcacagctggccctggcagggcccggacacctggggcccgacccacccctgcgcaccccgcggtgtcgccttcccgggaggctcgggttcccagatccccttacccgggcgtctcggctgtcgcgccctgggccgggggaggggaggctgcaggaagcggcggatccggcggcggcggcgagggcccgggtgggtggccgaacttctcccgccatggagggagcagcggcccgggaggcccgggggaccgagaccccgcgcgcgtctgcgcccccgcccgcgccctcggagcccccggccgcgccccgcgcccgcccgcgcctcgtcttccgcacgcagctggcgcacgggagccccacgggcaagatcgagggcttcaccaacgtccgcgagctgtacgccaagatcgccgaagccttcgggatcgcgcccaccgaggtaaggagcccggacaccggcgcccaagaccacccgcctgatggggtgaggggtagggagcttggaccctggacgggagaccccagatccccggatcccagacgtcggggtggccgcctaatcgccggatctcagagacccagccctcagatcccggggtgccacactcccaggggccccctttgcacgctctgcgcaaaagatgggcaggtcttaggactagcggacccctagatattccagaaaatcctctgcgcagacctagcttggagcggaccccagccctcggggaagcgcctctgtgcttcctgggcgtagctggggtctggggttccagatggcccccttagggatgggaagtttgaggccgccgtggggttggggggttcctgggcgtttttccaatccgggttcgtttggtttgcagcccccagggggcgccagcagattaaacctggaggtctgggggctggaggtcccggggtatggagaggggtctccacctgctggaagtctccttctccctcctctctctgttctgggggtcccacgccctgccctttcccatgggctgggatcctggtcgctgggggcaggggcctgcgcagacagggtggctgcgtggggggatgcatgccctggctaactctaggctccttctcccccgggaagattttattctgcaccctcaacagccacaaagtggacatgcagaagctcctggggggtcagataggcctggaggacttcatctttgcccacgtgcgaggcgagaccaaggaggtggaggtcactaagacagaggatgctctggggctgaccatcacggacaacggggctggctacgccttcatcaaggtgcccgggagggggtgggcgggtggcttcctggggtccagcaactgccccccccactctgggtcgacgtgggttctgcggattggaggcgggtggctggggttgccctgccagcgacgctggatccctgcagagaatcaaggaaggcagtatcatcaaccggatcgaggcagtgtgcgtgggtgacagcatcgaagccatcaacgaccactccattgtgggctgccgccactacgaggtggccaagatgctccgggagctgcccaagtcccagcccttcaccctgcgcctggtgcagcccaagagggccttcggtgaggcgggtgggctggcgggagctcttcccgaagtgcgttctacggatgcctggggtggaggagggtcggggatgggacgggctggaaggttctaggtgcacccgctgcgtgccaaggagctcctggcagggtatcagaaactcgtaggtagtttctattaatagattgttatggagtcagcctgtgggggaggggtgggggagagactgggtaaagtggagttggaggaggacgcgtccagaaccactttggagccaggctgggagacttgtttttgtttgtttgtttgtttgtttgtttttgagacggagtctcactctgttgcctgggctggagtgcaatggcgcgatctcagctcactgcaatctccacctcccgggttcaagcgattctcctgcctcagcctcccgagtagctgggactacaggcacccaccattgcgcctggctaatttttgtatttttagtagagacggggtttcaccatcttgaccagtctggtctcgaacttctgacctcaagtgctccacccgcctcagtctcccaaaatgctaggattataggcgtgagccaccgcgcgcagcctgggaacttttaaagcagtgctttgaggtcatggtggattgtagagaatgagaatatgagaaaaaagttttctttcttttcttttttttttcctttcttttttcttttcttttctttttttttttttgagacggagtctagctctgtcgcccagactgcagtgcagtggctagatttcagctcactgcaagctccgcctcccgggttcacaccattctcctgcctcagcctcccgagtagctgggactacaggcgcccgccaccacacccggctaattttttgtattttagtagagatgaggttttaccgtgttagccaggacggtctcgatctcctgacctcgtgatccgcccacctcggcctcccaaagtgctgcgattacaggtgtgagccaccgcgcctggccgtgccagctaatttttaatttttttctttttttgagacggagttttgctcttgttgcccaggctggagtgcaatggtgtgatctcggctcaccacaacctctgcctcccaggttcaagtgattctcctgcctcagcctcccaactagctgggattacaggcatgtgccaccatgcctggctaattttgtatttttagtagagatggggtttctccatgttggcaggctggtctcgaactcccgacctcaggtgatctgcccgcctcggcctccgaaagtgctggaattacaggcatgagccactgcaccctgcccattttttttcataactagactttctcaatgaagaaaacagtgtattgatttacacactagcacattctcctcatgtagccatgggttggccctttggatagcgttgttctatagaacagagacagagattctagaagtgccccagcacacatggagagacgtcccagggagagtgagctgtatggggttctagaatctgccctgccgtggctgtgaactccaaaagccatgcctaaaaatagagtttaggccgggcgtggtggctcacacctgtaatcccagcactttgagaggccaaggcaggtggatcacctgaggtcaggtgatccatcgtatcaaaaaaaaaaaaaaaaaaacctggctgggtgcagtggctcaagcctgtaatcccagtactttggaaggccaaggcgggtgcatcacgaggtcaggagttcgagaccagcctggccaatatggtgaaaccctgtctctactaaaaatacaaaaaattagctgggcatggtggcaggtgcctgtaatcccagctactcgagaggctgaggcaggagaatcgcttgaacctgggaggtggaggctgcagtaagccgagatcgtgccattgcactctagcctgggtgacagagcaagacaacatctcaaaaaaaaaaaaaaaaatcaagcttagtctgagactaaacccagctctagagcccaggccagctctcagaccaagccctgctcttaagcccaggccagctctgagactaagtgtgtttctagcacctcagtcctgacactaagccgggttctggaacccagacaagaacatatctagattgaggatcctaccacaaggagggtcccaagcagtcccttctagagaaagtcgctagaagagggagagtgagggcatggaactgggatgttagttctaaacctgctccattacaacacctcattctggacttgtgatttagtttgctggggatgcgaagtgtggaatctcgaataggtctctggagacttgccgtacagatgtaaggaggactttgaaggggaggaagattctagaaaggctcggctgttggcctcccagggtttacaaagatgtggctccacccagaacccatggccatccctcactctgttccctccagatatgattggccagagaagtcggtccagcaaatgtccagtagaggcgaaagtgaccagcgggagggagaccctgcggcttcgttctgggggggctgccacagtggaggaagcggtgagtgaaggggaggggctctccccaggcttctgcaccttcagctcctccactgagtcagtgcggtcttgggtaagaacttctcctcggagcctcagtttctctgcctgcaaaatgggtcctcattgaaaagtggggcaatgatgttggtaccagcactactgactcgtgtgagggtccagtctactcttcccttaggggtgggggtcgggagggggctgggctggagggctccaaagcttttcacccctgacttccctcccgtgtgcccccagcccagtgagtttgaggaggaggcatctcggaaggttgatgacctgctggaaagctacatgggcattcgggaccccgagctgggtaaggggccagggtaagccagggggccctggggggagggaagcctacgggaggaggcaggggtcccagcgggaagttgggcgcggggagtgccctcactgacatcccctctggcacggcccgcagcgtccaccatggtggagacgtccaagaagacagcgagcgcccaggagtttgcacgctgtttagactccgtcttgggcgagttcgccttccccgacgagtttgtggtggaagtgtgggccgccatcggcgaggccagagaggcctgtggctagtttgccctgggggggcccagcacagccccagcccggagcccagccccctgccccggccctgctccagaacccagcccagatcggaggacaagttcctctctagaacccaatccaatttggagccccagcccaactccagaacccaacccttctctagaatccagcccagatctgaggccaagctatgtgctagagcccaggccagctctgagaccaagcccagcattgagaataagctctgttctaaaactcaggccagccctgagaccaagcccagctctagaactcagatgagctttgagaccatgcccagcactgagaccaagccctgttctagaactcaggcctgctctgaggccaagcccagctctagaacccagatgagctctgagaccatgcccagctctagaactcagatgggctctgagaccatgcccagctctagaactcagatgggctctgagaccgagcccagctctagaactcagatgggctctgagaccgagcccagctctaaaactcagatgggctctgagaccatgcccagctctagaactcagatgggctctgagaccgagcccagctctagaactcagatgggctctgagaccgagcccagctctagaactcagatgggctctgagaccatgcccagctctagaactcagatgggctccgagaccaagcccagctctagaacccagatgagctctgagaccatgcccagctctagaactcagatgagctctgagacagagcccagtattgagaccaagccctgttctagagtccaggccagctccgagaccaagcccagctctagaacccagataagctctgaaaccaagcccagcatagagaccaagccgtgttctagaattcaggccacatctgaagccaagcccagctctagaactcaggtcagccctgagaccaagcccagctctagaacccagataagctctgaaaccaatcccagcattgagaccaagccctgttctagaactcaggccacctctgaggccaaacccagctctagaacccagataagatctgagaccaagccctgctctgaagcccaggccagctctgagacgaagcacatctctagaatccagctgagccctgacaacaagccaaactctggaacccagacacattttaagacccagaccagcttggagaccaatcccagttccagaatccaggctagctcggagaccaagccctgctggaaaactcaagctgactctggaactctggacagctccacgatgcagccacacctggacactcggtctagctccggaaccccagttaattttggaacccatgtgagattcatgaagcagcccagctctggaaccccagtcagctcaggattcagagacagctcccaaatcaaatcctattcaagaactcagaccagctcagaaacccaggtccacacggctgcccagtccagatcccaaccccagttgcatccaagtgcccatccccatcctgcagcccagtccagctccagtgatgattccagctctgagactgagcccagctctagaacctcgcctagtgctacaaccaggcccaactccaggattcagaccagctctggaaccccatccatcttggaagcaagacccagctccagcacacagcttggtgccaagccccactctccttgcacaatgcagctcagctctagaatgcagtttacttccaggacccagaccaatttcaaggcctggccaagctccagagctcaatccagcccaagcaccgcacccagctctggaactcagctcagttctggagcacaggctggttctgaaatcccagccagctccaaaacacagacagcagctgagacccagccaagttccagaatccagctaagctctggagtccaatctagtcctgggacccaggccatcgcagcaatagaattaagctccacagccctgtctagttccgacagcaggtccagctccaggacccagcgctgcccaggagctcgaccagcctctgggactcaattcgcctctaaaaccctgccaggttctagataccagctccagaccacagccccagacagctctggtattcaactggactttgggaagcagagcagttctgaaagtcagcttagctttggaactcagcccagctctgggacccagataagctcaagaattcaagccagctctggaagtcagcttagttcgggaacccagctgatttccggagcccaacccagctccagaactcagactagttctggaaaccagctcagctccgggacccagaccactgcaagaattcagctcagccctggagctcatcttagctccagaacccagtccagtcctgagaccaggctcagctctgaggctcagtccagctctggaacccagttcagttctgggattcagtttggctctgaaacccagaccggctcaagaattcagcccgactctggagcccaacttagttccagaacccagtccagctctgagaccgggctcagctctgaaacccagaccggctcaagaattcagcccagccctggagcccaccttagttctggaacccagcctgtttctggaacccaatccagttccagaactcacaccagttcaagaatctggctgagccctggaaatggaatctgcccacagacccctggccttgaccctagaatccagcttgaggcccctgccccagcccaacctcagcccccaggcccatcccccagagaccccaccccagcccctagcaaagacccccagcctctgcctcagccccatgatcaggtatgtggcatccaggccagccttggccccatcccaggcttaccccaagcctcctacctggccccacagtcacaggtctcctcaaccccccagaagccagccgtctctcccaagccccgggtgggaccccagaagtccaccccacccaccatatctgtcactcctagtcctgcccctagggcagccctcctgagttcccagctgtctgagtccccagctttggcgccagccctttgccccactctgggggagccaggagcccgcccttaccgcggggggccgtagcttggctgtgacttagccctggttcatgtggttctcgtcctctcctgtcccttccagcctggggcccccagaagcagcaagtgaccttatttctccagcaggcggtggtagggagtgtgcggtggtgaaaacaggggcttcaccggtcctggctcagatccaggtccttggagggaaaaggagggcaggagacgggttgcaccgcatgtaccctgagggctcatggtgaataaaggcaccttccatctctgcagcctggtgtgtcattttgggggaagtttgggggaatgcagagatgtggggctggggggctggctgaaactgtggcaacactgaatacctcttgagcacctactgtgtaccaggcacttcattaagcaccgcacaggcatgagcttacgtgcctgcaggcgacaggtgctccacgaagacccagccactggtcctttctaccaatatttattgagcacgtactatgtgcaaggtgctgtacagaacactgtggtgtttgaaaggttgctgggtgaacaagtgaacagtggaggaaacgggcatcactccacgcttttgcatctctctctctctttctctgttttatttatttacttatttacagatggagtcttactctgtcgcccaggctggagtgcagtggcatgatctcggctcactgcaacctctgcctcctgggttcaaccaattctcctgcctcagccttctgagtagctggcattacaggcgcccgccaccatgcctggctaattttttgtttgtttgtttgtttgtttgtttgttttttgagacagagttttgctcttgttgcccaggctggagtgcaatgacgtgatctcggctcactgcaacctccacctcccgggttcaagctattctcttgcttcagcctcccgcgtagctgggattacagacatgcgccaccacgcccggctaatttttttgtgtatttttagtagagacggggtttctccatgttggtcaggctggtctctaactcccgacctcaggtgatctgcccgtctcgacctcccaaagtgctgagactacaggcgtgagccaccgcgccctgcaatttttgtatttttagtagagacaggggttcaccatgttggccaggctggtctcgaacttctggcctcaagtgaccctcccgcttcggcctcccaaaatgctgggattacaggcatgaacaatcgcgcccggcccatttatatctacttttaatgacacacagattcaaaggtggtttgattgcaggttccagggctaacctgtagccctcccattacaggctgctggaagaattctaggtggtaccacccatcaagtgattaggaaacactcaagaaacaaggtgggggaggaaccgaatcctctatgtccctccccatccttcccagccctgccctcgtctgctccgggtgaggcccaatgcacaaactccagagattgaaaacttctggacccaaaggaaaataaaaccaaaggcagagatatattttggcaagaaaagggggtgcccccgttcacattcaatcctttctggacagagccttccctgttggaggttcaaaaggaagcaactgtaccccagcaagtaggtcaaattcagggtcaaagagcatgcaaggccgggcgcagtggcttacgcctgtaatcccagctgctcgggaggctgaggcacgagaatcgcttgaacccgggaggcggaggttgcagtgagccgagatcgtgccactgtactccaggctgggccacagagtgagactccgtctaaaaaaaaaaaaaaaaatggccaggtgtggtggttcatgcctgtgatcccagcactttgggaggctgaggctggtgaatcacctgaggtcaggagttcaagaccagcctggccaacacggtgaaaccccgtctctactaaaaatacaaaaattagccgggcgtggtggcgcgcgcctatagtcccagctactcaggaggctgaggcaggagaatcgcttgaacccgggaggtggaggttgcagtgagctgagattgcgccactgcactccagcctgggggacagagcaagactccgtctaaaaaaaaaaatagcaatgcaagaccctcttccaatgtctgcatgcccttcctggggttgggagggacgcagagaaggggtgggagctctggatgggaaaaaggggccgaggaagggagagtgcttggtaaaaggatcagggaggagttgggggtccccgggttggattggggtcaacccaaaaccctgctgctgatgcccactgtccatccagcacccccagcccctgaatcctcagaacaggcagatgggctgtccgaggggccaagggctccgcggaaaggcgcgggaggggcgctctgtccacttcctactgcagcccggagcgctgcgtgagctggggctggagggacagcgacctgggccgggtgctgaggcgaggctggagacgccggagcacggcgcggcggaacaggatatacacccaggggtccaggatctggttccaggtggccacgcgcaagtagatgagcagctccttctccgtggtgcgggacagctgcccggcggggctcatggcaggcgggtttcgcagcactgtctgggcgatgaagacctgcaaaggggagagctgtcagcctgggcccccgcctccagccccgcccgccccggtccctgcccggggtcccttgagatccagggtccactccgttttttaattttatttttgagacagggtctcactctgtcgtccaggctggagtgcagtggtgcgatctcagctcattgcaacctctgcctcccgggttcaagcaattctcctccctcagccttccaagtagctgggattacaggtggctgccaccacacctggctaatttttgtatttttcgtagagatgggggtttcaccatgttggccaggctggtctcgaactcctgacctcaggtgatccaccagcctcagcctcccagagtgctggaattacaggagtgagccactgcgcccggccagtgtccactctgttactgcattgctgggtgacctcaggagagttgactaaccgctctgagctccttttgatgggttcataaattagcgcactcttagccaggcagtggctcacgcctgtgatctcagcactttgggaggtaaataggagagaatcacttgagcccaggagttcaagaccagcctggggaacatagtgagacctcatgtctacaaaaagttaaaataaatagaaaagttacccaggcatggttgcactccagcctgggtgacagagcaagatcctgtctcaaaataaataaataaataccttttttttttttttgagacggagtctccgcctcctgggtttacgccattctcctgcctcagcctcccgagtagctgggactacaggcgcccaccaccacatccggctaattttttgtatttttagtagagacagggtttcactgtgtcagccaggatggtctcgatctcctgaccttgtgatctgccctcctcggcctcccaaagtgctgggattacaggtgtgagccaccacacctggccataaataaaatatttaaataataaaaattatatttatctataggtcaggattgatgggaaatttttttttttttttgagacggagtttcactcttgttgcccaggctggagtgaaatggcaggttctcggcttaccacaacctccgcctcctgggttcaagcgattctcctgcctcagcctcccgagtagctgggattacaggcatgcaccaccacatctggctgatttttttgtatttttagtagagacggggtttctccatgttggtcaggctagccttgaactcccgacctgaggtgatccacccgccttagcttcccaaagtgctgggattacaggcatgagccaccgcgcctggcaggaaatttttaaactatatttaaaaatatttaaaataagaatgttatctacaaattagtatataatatataataatcaattatatgataattattcataattataatgtggcctataattgatatatatcatatatcatacaattatattataattaaatgttacattatattaaaatactttgtttgagatcagcctgaccaacatggtcaaacaccatctctactaaaacatacaaaattagccgggtgtggtggtgcacacctgtagtcccagctactccggaggctgaagtgggaggatcccttgaacccaggaggcagaggttgcagtgagctaaaattgtgccactgcactccagcctgggtgacacatcgaaactccatcttaaaataaaataaaataatttggccgggtgcggtggctcacacctatactcccagcactttgggaggctgaagcgggcagatcacgaggtcaggagattgagaccatcctggctaacacgatgaaaccccgtctctactaaaaatacaaaaaaaattagccgggcatggtggcgggcgcctgtaatcccagctactcgggaggctgaggcaggtgaatcgcttgaacctgggaggcggagcttgcagtgagctgagatcgcaccactgcactccagcccgggcaacagtgcgagactccatctctaaataaattaaatcaatcaatcaatcaaatcatttcctgagcagtaggtcctgtaggctgaatgaagcagcaacagcagctgaggaactcccagggcgcaccctcataggctcacagtccagtcgggagacggaaactgggtccggggagttacagcatggggtgggcaaagctgtgaggaggaagcaatgtcagagcccagaagaggtgcctgacctggcctagggaagtcactgaagggcaaatgggagtgggcaaggtgcgtctgcaggaagtgcctgtgagaactttcttctgagggcaacagggagccatgggagggtttagagcaagggttgacccatgggccaaatctggcctgccacttgctttgggttttttttcttttcttttctttctttctttcttttcttttcttttttttttttttttttgagacagagtcttgctctgtcacccaggctggagtgcagtggcacaatcttggctcactgcaacctccacctcctgggctcaagcaattctcatgcctcagcctcctgagtagctgggactacaggagtgtgccatcatggttagttaattttttttagttttagtagagatggggtttcaacatgtaggccaggctggtcttgaactcctgacctcaggtgatccgcctgtctcggcctctcaaagcgctgggattacagacatgagccaccgtggctggcctgtttttgtttgtttgtttgtttttgtttttgtttgaggcggagtctcgctctgtcacccaggctggagtgcagtgacgtgatctcggctcactgcaacttccgcctcctgggttcaagcgattctcttgcctcagcctcccaagtagctgggactacaggcgtgcgccaccacgcccggctaattttttgtatttttagtagagacggggtttcaccatgttggccagcatggtctccatctcttgacctcatgatctgcccgcctctgcctcacaaagtgctgggatttcaggcatgagccactacgcccggcctgttttgttttttactaagaatttctttccatgtttaaatggttagaggaaaacaaaatagaggcaaaaattgagtgacataaaaatgacatgaaattcaaatttcatcatctatccatcagtagttttattggccacagccacgcctactcatttatgtgttttctacggctgctttctattttttttctttttttttaatttggaggcagggtctcactctgtcacctaggctggagtgcagtggtgcaatcatagctcactgcagcctcaacctcccaggctccagcaatcctcctgccttgacctctcaaagtgctgggattgcaggcacatgccaccatgtctggctaatttttttattttttatttttttttttgagacggagtctcgctctgtcgcccaggctggagtgcagtggcgcaatctctgctcactgcaagctccgcctcctgggttcatgccattctcctgcctcagcctccagagtagctgggactacaggtgcctgccaccacgcctggctaatttttttgcatttttagtagagacagtgtttcaccgtgttggccagaatggtctcgatctcctgacctcatgatccgcccgcctcggcctcccaaagtgctgggattacaggcgtgagccaccacgcctggccttaatttttgtatttttagtagagacagggtttcaccatgttggccaggctggtctcggactcctggcctcaagcgatcctcccgcctcagcctcccagagttctgggattaccggcgtgagccaccgcgcccggtcccaccatcaggatctaaatccaccctgggtgaccagaggtccagtcaggagggtagcaggaccccgcagagcccctactcaccagaaggggcagccaacacacgctggccaccaccatgatccccaggagctgagccatcatctccacctcggagtcccggggacgctgctgggccgcctcctgcccgtggtagacgtggcacagggtggccacgctgaccgtgttcagcaggaaggacagcccgaccgagaggccgcccagcatggagaagagcagcccgaaggccacgtccccggactcggcgcccagcgtcaggaagcaccaggaccccgggtattgcacggtgtagcgacccacgcccagcaggggcagcaggcccagcgccagcgcggccgcccacaccagccccacggtggcccaggcgcggcgctgcgaggcgaccgccgggcgcgagaagggccgggtgatacccaggtagcgctctgaggccatggcggcccccagcagcagcggggacaggccgaagaagatcatgacgacgcccatgaagcgacagagacggcagccagggtccacggcgtgccactcgaagagcgcggcgtgctgggacaccacgatggtaccggtcaccagcagccccaggaagtcggtgaggacgaggccgcagaggaaggtgaggaaggaggagcgcgtgtgcgaacccccctgccgcgcgcccgccagcacgctcagggccagcaggttggaggccaggcccaccacgcagaaggaggcggcgaaccagggcgaggcgatcagccgtctctcctccagggtaatgtttgtgggccggaaacagggccccagggaactgccgttgggccacatggctccggagccctgagggatcagtcaccaccccatcaggccgatgctgcagacagggcaggctggcactggttcaggcacacctgggaggcgagagaagatttgcttgtgattaattctgcatttcagtgtaagtagctctggtgaactcctacacaaccttcaatgccccagctcaaatatcctctccggttttttttttttttttttttgagacagagtcttgctctgtcacccaggctggagtgcagtgatgcaatcaaggctcactgcagcctcgaccttctggacccaagtgatccccccatctcagcctcccaaatagctgggactacaggcacataccctgtagtaagtagtcctcccgcctcggcctcccaaagtgctgggattacaggcgtgagccaccgtgcccggccttttcctccattttcatggtgtcggttttataataagaaataaaccctgaaatccagttctattttgggaacaaaaaacacttcttcggaatggcaggttccccagggatggttggtagagagcagcaggcggggacctgttactctgtgtggggctaacgctcagccacaatgcacaacaaaatcggagccaagccaggcgcagtggctcacgcctcttatcccagcactttgggaggccaaagtgggcggatcacttgaggtcaggagttcaagaccatcctggccaacatagcgagaccctatctcttaaaatatatatatatctgggtgtagtggtatgcacctgtaatccctgctacttgggaggctgaggttggaggattgcttgagccccagatgttgaggctgcagtgagctacaattgtgccactgcactccggcctgggcaacagtgagaccctgtctcaaaaaaaaaaaaaccaaccaaccaacaaacaaaaacgctaaaaaccccaaaaaacaaaaaaatggggccaggtgtgatgagtgaagtaaaaataaaatgagatggttcaaaaaccagcttctggctgggtgcagtggctaatgcctgtaatcccagcactttgggaggttgaggtgggtggatcatctgaggtcaggagttcgaaaccagcctagccaacatggtgaaaccccatcttcactaaaaatacaaaaagtagccaggcatggtggcgggcgcctgtaatcccagctactcaagagactgaggcagaagaaatgcttgaacccgggaggcagaggttgcagtgagccgagatcgcactactgcactccagcctggacaacagagcgagactccatctcaagaaaacaaaacggccaggtgcggtggctcacgcctgtaatcccagcactttgggaggccgaggcgggcggatcacgaggtcaggagatcgagaccatcctggctaacacagtgaaaccctgtctctactaaaaatacaaaaaattagccgggcgtggtggcgggagcctgtagtcccagctactcgggaggctgaggcaggagaatagcgtgaacctgggaggaggagcttgcagtgagctgagatcgtgccactgcactgcagcctgggtgacagagcgagactccgtctaaaaaacaaaacaaaacaaaaccagctccccataccccatgggtcatgtcaaagtccagagggttgtggctggttgtaaagtcacccaggaggctaggatggaacccgggtctcctgcctcttgccctgacacacccccaagtcacctggagggactgggtgggcaaaggtgggcgaatgggactgtgtgcgagatggaggtgccaggcagttaaggctcaaaaggtcctattacggtcaggcgtggtggctcacgcctgtaatcccagcactttgggaagccaaggagggcggatcacctgaagtcaggagtttgagaccagccggaccaacatggtgaaaccgcatctcaactaataaaaatacaaaaattagccgggtgtggtggtgcatacctgtaatcccagctactcgggaggctgaggcaggagaatcgcttgaacccgacaggggaagtgatgtttgtgggccggaaacagggccccagagccaagatcgtgccactgaaccaacctgagcaacaagagcaaaactccgtctcaaaaaaaaaaaaaaaagaaaaagaaaagaaaagagggaggcccaggtgggcggatcacgaggtcaggagatcgagaccatcctggctaacacggtgaaaccccgtctctactaaaaatacaaaaaattagccaggcgtggtggcgggcgcccgtagtcccagctacttgggaggctgaggcaggagaatggtgtgaacccgggaggtggagcttgcagtgagctgagatcgcgccactgccctccagcctgggcgacagagcgagactccatctcaaaaaaaaaaaaaaagtcggggttgctgatgacgggagtgaagggatccacgcgcagcactcagcacagcacagcgggcactcaatgcatgctggccctgaggcagggcctgggctgtggggtcgcagcagctaacgcattccagggcggtcaaatgggtgactgtggccctcactccccatctcacttgtgacgctttggcctggcttctggccttggctacgctgtatccagcctcataaattatccagctcctgacagcggcactgaactcccttcctgggaagacagctaaggccactgccaccgtggtgggaggcagggcttccagaggagaaactgaggcctggagagcagatgcggtggggggttcctcgcggcctctggcgatcgttgccctccactccgggctgctttggcgcctggggtttggattcctgcactgggatttcccctgggacaaggcgttcctccctcgagagctggtatgtgctgtttctggacattccttgggactcggctgtccctgcggccactgacccgacctctgcctggagcaacttccagtccctcctgggtctcagggtctcctcgaccacactccactccactcaccgggggtcacacacccggaactccctcacacctccggtggctgggagcaaatgcatggcccagagcccttggcccaggggagcctggaaactggcactgagtccttctggccacagctggctgtttccaatccccccacctccactccccaccctggcttcaggcgatggcagccatctcaagttctccaggcaaggatgccaatggggggaccgggcagggcctcccttccctcctgcattggccaggaggggtagcaggggcccccacgcggtggggcagtagagcagcactgcggctcttgggaaaattactgtccctccctgtgtctggggagaggtgtggacccaagatcgcttttcgatgttgaataactccagaattttgcagtctgagagcagacgtttgccctcagcgggttcagggttgtggaattctaacacgcttccagtcctgggacgcagaaggcctcacaattctagaatcccaagaggctgaggtcctgcaactcccaagaggctgaggtcctgcaactttgatgggaatctgcctgggtcccgggttccagaaatctctgtcttaattcctggcttctttctggaaggcggacagtgagttctccctcatccgatgccacccctgacagggtatccggcttgcaggtcgtgtgactcggagggctctgtccggcgctgtttccagaggcccgggcgctgggctgggcgtgggcaccaggcctggctgccccaagcctggttgccagtggaatgtgatccttggttcccaaacagcaggcctctcctccgccccatgttccatcctcgtgccccctcccccactccctggagcacgtcacctcatcatccatccatttctcaacaagtcccctctcctcagcaccccaccctgcccgccccgcctgcctgtcacggcctgagcccaccccacctcccccagacaggcttggaggctctagtccctgatctgccgtggccaggctggggctccaccttgccgagcctcagtttccccgctctgtgcaatgggggtgagcttctgatctccatgcctgcgggtgctaagctcaggcctccctggctctcacctctgcagggctcctggctgtactcacagctcaactccctacaaggtgcccgggcagccagcagggagccctgaggctccgtgtcacccctgtcggccttggaccttggacccacagggcccttttgggactgaaacttcagggaccggccagaccctcccatgcctgctgtagatctgaacgctcatgggcgtggacccccacatggtagcggaggcagacacactccacaccctgatgggcccacctcccctcatcgcaaagctccatttccgagaacatttcctgtttgtgacaccaacagggtccccagcccacacagtgcagggcggggactcccccagccagccagactccggccagccttgttggggccctaagtcacatggccccctgtgagcctcgctttccccatctctctagtgggggctccccagggagcatgtacggagctccgtcacacaggggccagcagggaccagggggcgggacccgggaggtgcagctggtggttaatggtggaccacaagttacagtgattccaccaacatgcacctcaggccaccaccgtgtgtgcacactcgagacacacagacacagccagacacacacaggcagaaacacagcagacacacaggcagaaatgtgacagacagaaacacagcaggcagacgcacagacgtgcacagacacacacacagaaacatggcagacacacagacacacacacagatagaaacatgacagacacacaggcagaaatgtgacagaaacacagcagacagatgcacagacatgcacagacacacatacagaaacatggcagatacacagacacacacagatagacacacacagaaacaccacagacacacccagacagaaacatgacagacacacaggcagaaatgtgacagacagaaacacagtagacagacgcacaggcatgcacagacacacatacagaaacatggcaaatacatagacacatacagatagacacacacagatggaaacatgacagacacagacacacacaagcagaaacacaacagacacacagacacacgcagatagacacacacaagcagaaacacaacagacacacagccacacacagacacatacaggcagaaacacgacagacatagacacacacagatacacacataggcacacaggcagaaatgtgacagacacagacagaaaaacacagacacacaggcagaaacacaacaggtacatagatacagacagacacagaaagacacacagaagaacacacagtatttaacagtcacagactctcggcagaaacaaacacacggtcacacacacaaaaccaccacacacgcacagacacagacacacaaccagggccatgcatggttcactcccagagacaagatcacacacacagccgcacaaccacactcgatccctgccacacccagggcctgggccccctccccggctgcagccccctgagtctgggacccccattcacagccatgtggccccacagagaccagagagccccccggacagaatcagcctgggccgcacccagacccagccgcctgggcgcccagggcaggcctcagggcaccatgccacccgccgggccacacaggggacacctggcacctggccgctgtcaccgcgggctttgcgacacacccacagcagggcagggccagcgccggatgcgcccagcagcccgggctcacaccagagcagtgcatcccgccctaagccagcggggcgacctcaccttcagagacctcatctgcggggctcccacctggctggatcccgcgcccgggggtccgggcgccgtctggagctgagcaggcagatgtgcgggcgccgagggtggggcgagggctgggggcgggcagagggaggggaaggacgggctcgagcgggacctcccagggaaactgagtcagtctggctgtgaccaggggcgggcccagcagaggacccacacagatggagggcgtggcggcacaggacgccctggggtcgcggcctggaggggtccgcgggggctaagccgagctgggacgggtgggggccgctggcagcccgcggctcgctctctccgtccagtctctgtctcccgctgtctctcatcagccccgcccaccctgcgctggccacgcccctcgggcccgggcctggctgacttggagtcagtgggtgccccccgcacgccgggacaccctacagccttctggggaaggcggcgcccttgggacccccaggccaccggtggcagggatgcaatggcccgcgtaggggtggcaggggcgcttcctcgggagcctcagcccctccagccgcccagcgccctgccaggcctcttcccggcgctcccgccgccaggcccgcattattcaccatctgggcagcacccaaggcctggagggggcggggcaggtccaggcggatcggctcccgggggtcgcccagactccagggctccaaattcactgggtgcgctggaacgcggcacacagtagtagtatgccctgcttaatacatacaggacatatttgaggccccttccaggggtggggtgggaggacagagggatggggggtgcaccagacgacacagccagactgagaaaggtggtcccagagcaggtgagccgggagggctggggtgatggcatcgcatgggagggtctcttgaggaggctcggaggtggctttggagccagaggaggaacagtctggagccgggaggctgcagtgggggatgggcactctttcctggccaccccccagctcgggctggggaaggagggatggagcccaacaggaatggctgagaaggtgccggacgcagggactgggaccgtctctttgcagaggggggaccttgggcttccttggccttgtttgtacacccgagccggacagaaccttgagttagggacctggagtgggaccggacaagctgaccttgccctgactgcaccccaccccgtcccctgggcccgggagggctgctagtccaggctgtgagtgaggggtattcccagcctggcccggccctctcgtcagcccagtccggaagccccttccccggctaccccgcccactatccttcctcctcctggccttcggccacacccaacctccctcccaaagctctatcccattaagtcaccagccatttaacacaacttctctctttcctggcaaggaggctatccaactcctatggatgtggcaaaaccctggctccaaggctgctttcccgtgaagccgacctaatctccaagtcttactctccccaacccctctctgtgttcagcttatacagtgggacaattatgagctccaagtgagacctgaaaccaggcctgcccttcaggatgccctaggctggagaatgaactggacacaggctgttccagccccctggggtcagggctgggccaaaggaagagacagggcctagggaagcccagaggtgagctaggaagacatcttgtgaggagagggcatgggaagtggggttttgtaggatgaataggagctccccaggtctgggctacgtggcagtgacaggaattgcatgtataaagctttggaggcaagagagagcatgaggcccttgctacactaactgcaaggagggcagatgttgggggaggaggatgtggggctggggctccagatgagggggcagtgagagacggaggaaggctgtcctgtccccacttcctctgtcctcggccctgagataacaaggacaatgactcttctgggaaacagcctgggcagagttcagagaaggacacttgcatttagcttaagcctcaccacatctctgcaaggcagggggtaaagatactcttaaattttagagatggggaaactgaggcacaaagggggaacaatgccacgcccatgtgtgggattggaacatgagcactgggcttccctgtcatctggggctggttgctggtctcccggtcttggcccgccccccgccccccaccccccgccagcacttcgggttcaatgggagcacaggaggctctggtgggaggagttgtgaggggctggggggcagatggtgggaacagaggccaggctcaggatgtacccccgtggctgcggtttccggcgggggccgggcagggagcgtctattcttagctctggacacagccaaagtcaggaagctgggtgggggcgggggcagcttccaggacaccaggtggacctcgggccatggtggagagtcatggggtagatgggggggtggtgtgcagagcctacccctggcccccacctccagtctgcctgcagggtctcgacacccagctcggaggccctccccagctcacgcgccctccgtagctccctggtgcccagctcccctaggatctggctccttagcttggcctgagccctgtgtgccccctgccctgggcacacctgctgccctgtcctctgcaaggcagccgtcacccttctcggccagcagcccgtcttcccaggctcagtgcccgtgacccttcaggggtcccagggccccagctctgctccctccagactggggcccctggcaaaccatgtgtcttgccagttggaggacagccatctcccttggggtgcaaaaggaacgtgaggaggaggaagcaggatgctggggctgggggaatctctgcaggggcaggtggggaaactgaggcagggacggggtggtggtctgggattgggattctccagggtagagaaacccagcttctaatactggccctgccactttctgggctcaacaacgtgggcttttgtgagcctcagtttcccgagcagccaaatggaagtaaatactgtcacatagagctggtgggaggtctgggttaggcccagtacaggctgggctgcgccagccacgcacacacaacctgggctgtgactacagaacccggcctgtcccaaacaccactctgggctcaaaagtgccttctggtgttgaggatgtagaaagctgtgatcacgcccactgcactccagcctgtctcaaaaaaataaaaagtgccccccgagtccagcccggactcagccctgccccagcagcctgtcctgatcggcggtggagctggccaggaacccaggcaagaggctgcccagaggattctaagatggctctggccatctgccatcaacttgtgatgtctgctgaaggctgggctggggatggcagtgttgtgtgtgctgcaatgcgatttgggattctggagtaggctggtcagggtgggccagggtctgcggtgtggagagcggacgctgatcagatgcacttccctggccagttcccaagccctgtgccacagacttccgggatcctgttagaggtgggggctgggaggtgaccagtgccccaggggagtgcaggatctgccttgcacctctgcctactgcagtgaggacatttggggaggctcatcctgggcactgaagcacattgggcagcatccctggcctccactcactccacgccaggagcagccccaaggtgggaccaccacgaatgcccccaggcatggccaagcgctgcccccatgagagcctgggcccaggccagcagctgtgtccacccttgtaccctccctcctgtcgtctgggaaatggactgtcacccccactgtgggaggcaaggcagaggggtggggggcaaagacagatccgggcactaacacagctcccaagggaccaccgggccccagttgggtgccgtgttgtttcccaggctcttcccttgggacaaatgcgctgtgtcacaaatgccagcagcaactagggcagcgggtgtggggcgtcggacacgttacactctctgcatttctgcaaacctaagattattctaaaatacaacgtttattaaaaaaacatgcgatcttgccaataggccaattccatgagaacaaaagattttttttcccacctacaagtctttttagagaaacaaacggaactatttccagatgaggcggggtgtctgggaggggctgtgggtggtctggggctggtgactggtgaggttgggtggccctctgggggtccgggaggcactttccgttttgcttctgttggagatgttcccgtcggatgctgaagaacaagcctgccggctgggccactccgacctgggctgtggcacccgtgtggccctcggccctcctggcctgagaaaggggagtgagaaggagccactgtcctgatatgggcaaaactcggggtcactggtctcatgctccaaggccccgtgagcaggccaggtggggggatccctgggggaagcccctcacccttctccaacccccagccttcggggagcccctgccctccaggccctgtgctcagaggtggggggaggacggctcagtgacttttggttcccacgaccttgacagagacagggacctcgacgcatcctccatacccgctgcggggaaatggaccccaccagccagcacggggtgagttgggggccagtccctgcagagtgtgggtgtccacagagggtctcttctgcagtggcggatcgggcgccagcagggtcccggcctcagtgctgcctgtgcgggcgagggtggcctgtgggcagggctggagctgccccacagccgcgggctctgcctcacgcccagtgggtgccccgtgatgtggcagggctggccttgagtttcctgcttctcacgagcctggcaccgccaagcccaggcccctctggcccatctccacaacaccctgtgtggccgccacttggggcaggccctgtgggccccacccagcctggctgaggggcggtggagagtgtccgcctggacggtgaggtcagctggcggctgctggccaccctcgtgctcgaaagatgcccctagcgccccctccgttgcatcaggaccctaggccagcctgtcccagtgtctcctcagctcaccatggcaggctcaatggtgaccccccttttatataggaggaaactgaggcctggcgaaagaaagatgcggcctgaggtgggacgtgaacccgcggccctgcagcccagacagcggccccggagtgaccaccagcttcaccgaagcccctttactgtgcccccgaggacacctgcctgccgttccccagggccgtcaccgccgatagcggtagcgcttgaagtgaaaccacagctggaagatgccgttggcaaactggcagcggaagccgtggcggtgcgagtattcccactcgcggttgacgatcttgaaagcgatgtcctcgtagggcggccccgcgtggaagcgcaggatggcgaaatccttgttgtcggcgcaggcctccaggaagtactcgggcgtggagcgcttgtcgatgaggtcggggtagaagatgttgaacttgtatccctgcacgatcttgggcggtgggttgtcaaagtcgtagtgcgtctggttgtacttgttccactcgaagcccgtgtgcacgcggttgaagaagcgcggcttgcgtggccggtacttgtcggcccacaggtaggccttgccggtgagtggcatctccacgctgaactgcgcctcgtcctggcccatgccctccttggcccgccggaagaagatgtcctcggcgctctcgctggcgtctcctgcgggcgggacggcgttcacccgggcctcggcctccccctgggtcctggcctccctcctagcctctctggcaggggcggccgctggtgcctcccgcaaaaggaaaacaggctggggcgagctaaggcacatggggaggggacagggcctgggcgacccggagacccacaccatccgccccgagccccggaccttggtcttcatgtctatcgtcctcctgggtggggaccaagcgcagcgcgcttccccgccgagcgacaggagaacctggtggttagggcctggctgcgggatccagccccacgcatgacccccgagggggtcctggcccaggggttttctgaagccagtattttctcctctgtcttaggacggaggctgcccagggagtgctcggacagcggccggtaaaagcttccaccacctgtggccccaaggccagtgggccagcaagcccaggatgaatgaaggaacgccccagtgcgcgtgcaggtgacggaatgcacgctcagagacccgggggagaagcagcaagcagctccccactgacgccagcggcttcggccgggaaatgaggctggagaagccccgcccccagctcgccccactggccccaccccctggcctccagccccgcccttacccgtgacctggagctgctggcgcgagagctgcaggcgctgcaggtcctcatccggttccagcacgtgcgcgtccagtggcagctcgtgcgccgtgagcagccgcgggctgtacctgccggcgtcgtagtcgtccaggctctgctggatcaggtcctcctccatgagcaccgcctcgccctcgccctcgccctcaccgtccccgtcgccgtcgccctctgtcggggtcgcgccgtccacctcggcctccgcggggccgccctccgaggagggcccgggcggggtgggcgccgcgtcctcaggctccaggctgggaggagagagcgttggaggcgcggaggctgcccacggcccctccatcctgctccgcgtctgcatcggcgtccccggggtgccggccgggcctacctgcggctgggggactggggctcctgcttgaggatggggaacagcggctcgctctccacgccctgctcctgcttcagtttgtacagcttctgccgcagcacgtcctggtggcgctcacgcagcctgggacgcagagccggggtcacccgcatggaggcgaaggggctccgcgccccacccccaccgagattctcacgccccttattgctgcaaggaccctgagaaggtggcgagcagccacggctctggctgggacctttgcccaggcttggtcagttcagggtcaaggcttatgggagagaggacgagaggacgcaggtaccctggtgaaccatcccatggcagggagaggtgggtctctgtctcacgctgcagtctcagtgtcttgtggctggggctggccaggagaaggggcccagcaggacaccagccaacaagcatgataaatttagagacatttacaaattagcagaggagacatgtatttacacagcggtgccaaaaacactccagaaatctgtacacagccagaggccgggaggcagcagcgctgggagggcgcaggcctgggcgcaaggcagtggggacaggcaggccgcctgggggcttcctgtgatgccatggctgctggagcgcgccaggtactcgttaaagggcggaagctcctggggagccctgtgagaccaacagggctgactccaggtgagggcactggagcatcctggggccttcccgctagggcacgggactacgcgccccccggccccccttcgtcactcacaggctggccccggccagtcggcactttcctgcccctctccaccccacatggtcccaggaggaggcgagacccaccccacccaggactcaggagggggcgaaacccatcccacccggacggcaccaaccctggtacccgcacctagtgctcaccgggcccgtgccatgtgggcacgaagctgctgcaggaggctctcccagtagcccatgtccaggttggggccaccagcgcggattttgccctcgatgccctggaagatgacctgcagctggttgtatgtcttccccttgaacaccgactgcacatcagagctgacggaggcgttgaccccctcgcggcgctcacctgcagcggggtgggggcatgggggggcggttccacatttcctacgtgctcctccaccccatcagggcctcctcccctgccatgggggggtccccctcccctcctcttcccccacaggggtcccatccagtcccgccacctccctggtctcaggttgtccccaccctggccacagcggaggggagggggtgggcggaggttgggagccacgttaagatgcagttgctgaggccttgacctggaggcccaggcccccagcgtgggggaggccaggactggccctgagaatgcccctccccaggtgagtctgatatgtgggtctgggaaccctagttgtgggcccggcccaccaacctggcccaactctgccctggccttgggcagtccatgagggggttggggggtgtgctcggtagccaggctctctggaattcagatcttctctgccagcctgggctgtgtgactgtgggcaagtggcctgccctttctgggccttagtttccctctgtgaagcctagcaaagaaggccaccctgctggcccctggggaagtcctgggcccgccccaggacaaacagctccccaccgccgccccccatcctacatggagtctgtctggcatctaccactggcccaggggcccgaggctcaagtccctcctcgatagacggggaggctgctgagggcgggagtggggtgctgggaggctggagcctagcctgactccgcgtgctctgccccacaccacgtggcatcccggcggcctcagtgctgctctcaggccacttccacccaccccgctgggtctggcctcacctcgcaaccctgccccttgctgcccatgccgaacccctgccacctctgggcctttgcacgcactgtgcttcctgccagctacccatccttctctgtcccattcgcttcctgaattcctcgcatcctccatgctcagtgagaacatcccttccgccaggaagccctccctgaccatccagcgatggcagcttcccgaggcgggcaatggggctggctgctgctgttccctgtgccatgctgggcccacagggagcttggtgcatagctgctggtgacacactgggcgggggtgaccagtgcaggcaccctgctcgagacctgccttctccagtccccgctggcggacagagggtcaagaggcccacacctacaccacaggggactggatagagtctagacggacccgagtcccctccagccaatcacctgggaccctggaatcggcacccagagctgcagcccctttgctgggcgctaagtggcactggaatccgtggcagccccagccaagcacagcgcggccgtgcccagacaggcggggctaccacgaacactgaaacccaagcagaagagcccagccgcgaggctcccaggaagccaggccaggtgccgccaggtcagcgtctatagaaagccgggtctggacatgctgctgcatgtctggatgcctcccgaatgcccacaagggggcccgggggtttagggggtcccagcagctgctagaggctgggggtgcaggccaagggccctggggctgcgtgggggaaaggccaggccctacacagggtgggaggctaatgaagctgagctgggatgacacccgttttctactgcacaacctcctgtagggttagaacttcctagaaaaagctaggtgcaccaaaatctcacaagtcaccactaaagaacttattcatgtaaacggccgggcacgatggctcacgcctgtaatcccagcacttttggaggctgaggtgggtggatcacgaggtcaggagatcaagaccatcttggccaacatcgtgaaaccctgtctctactaaaatacaaaaaattagccaggtgtggtggtaggtgcctgtaatcccagctacttgggaggctgaggcaggggaattgcttgaacccaggaggcagaggttgcagtgacctgagaacacaccactgcactccagcctggcaagagagcaagacaccgtctcaaaaaacaaaaaaacttattcatgtaaccaaacaccacctgttccccaataacctacagaaataataaaaaaactttaattttgtaaaaattaaaaagaaaaagcatgcagtcactcatgcctttaatcctagcccttctggaggtgaggcaggaggattgcttgaggccaggagttcaagactagcctgggcaacacagtgagaccccatctctacaaaaaattttcagaagtggctgggcacagtggctcacttctgtaatcccagcactttgggaggctgaggtgggaggatcatgaggtcaagagattgagaccatcctggccaacatggtgaaaccctgtctccttaaaaatacaaaaattagctgggcgtgatggcgcgcgtctgtaatcccagctacttgggcagctgaggcaggagaatcgcttgaatctgggaggcagaggtcacagtgagcagagatcgcaccactgcactccagcctggtgacagagtgagactccttctcaaaaaataaaatagctgggtgtgatggtgagcgcctgtagtcccagcttctagggaggctgaggtgggaggatcacctgaacccaggaagtcgaggctacagtgagccttgatcgcgccactcaactctcgcctgggcgacagagcgagaccttgtctctgaaaaatgaaaagtaaaaggaaaaccccaattaatttaagaagatccaggacaggggctctgtgggtctccagggggacagcaaagtcaagacccctcggttccctactcctggaaaccatgttgaaaggagaatcagaaacaaactccctcggaagacaccaaagccacctggggtccccaactgtaacgcgtgaggggaaaggagggctgagcgacgtggtggaggcagaaggccatggaagggatgggagaggccggggcctagggcagtggggcacgctggaaacgcctcccaggcttataggagaggccgggcccagggcaacgctggaaacgcctcccagtcttacaggagagggcggggcctagggcaacgctggaaacgcctcccaggcttcctgcagccggtgggtagggtctgcggcttctgaaggaaaatgtactgcacccagaagtctttgcccagccccgctgccaccagcaggagcacaccaagacccttaacggacacacctctgatgctggagaactgccctgcctctctgaggttacgggagaatgtgccccacggaggagaccactggagggacaggatggctgagtgaactccacctccggggaacacaaagctccactgaaaaagaggaaagccacaggctctttcctaggaaggacctgccacagaccacgctgagggctgcaaatgacactgacccagcctcctgggatcctcggccaccatgatggcacccaaggcctgagagggagggcaggggaaggaccgggtctatcgacagggatgcgtggcccatgagagccaggcactgttacagcagccgctggggcgtggattttggcggggagggggcagggctgctgtggttggcttttagaccggggggggggggggtctcatctagggcaattctgcccccaggggactctgggcaacgtctggggacatctgcggttgtcaggactaggggtgctcctgaccctgggtggaggccagggacgttgctcagcacccagcagtgtccaggacggccccaccctagggaacggcccagcccgcatgtccgcagtgctcagggtagacgctttagagcatccccggtgaccatgtgtgtgcaaccacacggaggggggggaaacgtgattttaaaagcccatcaggttggaggggcacgaactgacgcacgggacaggtagcgccctgaagctgggctgcacggccttcaggccaggtggagcgagacttgctgtcaaacaggcagagccactgagagcactgaaacctgagcggaaagccccgtggctcccataaggccggcaccgccgagtcagcgttaacgggacgctgggtctggacgctgctggccctgcaccccagacagaggcccgccccactcatccctcccagggcctactgcccgctgctgccccctggtggctcggcccagaaggggaggccccagttggggaaaccgaggcctgcagagagcaccaggccccacagcaagtctgaggcttctgggtgaacactgtagcccccgcagctcccctggagcccaggcccatgcccgccgttacctggccccttgcccgaggcctccagcttgcggagcttggagatctcgtcctcggtgatggtggtcatgtcccgccagaagtcggcgttcttgccctgctccagctccatgtagacctgggggcagggggcaggggtcaggacacgggtgtggctggggtgggggtgagggtgcaggtcagaggagcatcgggtggggctgggtacctggatatcctccagcaggtcctccatgtcggccacggtgaggccgttgaggaacgtgtagggctcatgcatctccacggccagatcgtcatcctcagcgctgatgtacttggccagcaggtcgatgggcttggcccgcccgtcccggatgcggatcttggaactgtggggagcaggggaaggtggcatcagagcctgggctgtgccctccatgctaaagaccctgcccttggggtgaccacaccagtgggagccgaggaggggcctgacccgttgggggtggtcagggaaggcttcctggaggaggaggaggaggaggcataaggtagagtgagccgggtcagccaaagggcgcaggccagcagtgcagacaaagtgcaagcagcgtggacccggaggtgggccaggtgggaggggcttcctggagggcctctgggatgtgcccaggatggcggcttctatgtgggctgtgatggggaagagtggaggagctgaagcagaggcaggctgggggaccagagtagtcactgccttgcaaccacctcctcccccaggcagaccactcggggcagagagccgggtttctgttctgggcctgcaggggggtacgcgttgcaggcgggccctggtccaacccaagggaacccgtcaccagggaggcccgagctgggaggagcctgatgtcacccgccacggggcccaaggcaagcagggacaccccggagcctcagcttgtctgtaaaccaggcggatgggggtgccaccctcctgggtggagtgtgggagggacaactgcagtcagtgcaggactggcgtccagcatgcgtggggtgccgttcacctgggcccgtctcctctgcaccctgcccagcaggggagggcaggagacagaagccttgccgcccgggaaggggtcaggaagggaaggtcccaggaagtgccgtgtgggaccctgaagggtgggagagcagtggcttccagagtgacagccagtgcccggccctggctccaagtctgggtcggagggagggggaggccccagcgcaccgcagcttggcctgctggaggtggaagttgtcctcctgctcctcccatgtcttgaagtgctctgcctccttctcgcgctgcagcatctccagctcctgctcgcgcatggccttctcccgctcccgctccagccgcagctgcttcacctgcaggcacaggaggctgagggcagcggggaccgtgcggtctgcagggctgcggggggaggggctgtgatgatgggggcccagccttcacccagctgccctgggcacagggattggtccggagatgcctgggctggtggacagaccttgggaagggagagggccctcctgcccgagactcagcagctcagatcagctggggccctctcggccaccctgaagggagcatgtgggagtgaaggcccgaggccagcagagccgagaggtggagggaaacagtttcctggggccatggtctgagcccctggatccagccttacctgaagccagcccccaggacttcccacttaagcccctcaagtcctgccaaagggggcgggcctccaggccctggaaagggagggccctgcccagtgggctggcagggtgcctaccttctgcagctccagccggttgtcctcctggatcctcttgttccgctccttcagctccttctcctccaggtggctgatccccttcttctccagggcctggaagcaccaggcacacctgccctgagcacagacccgccccctcgcccccctcctcagctccttcgtccaagagattgaccagggcccttgttttgcagagagaggtgacctgccagcactgcacgtcttccaccccctccttaacactcctgaaacccagtgcatccaattcagtgcagacatggagcccccactgggagtgagatgtatgcaaagggtaagaaggggctaccccaactctcaacaggagggcctcactcggggccgccccaactcccaacaggagggccttgctcggggccaccccagcccccaacagaagagccttgctcggggcctgctgactcgctttacccgggagtctgagtgcttcggacgtgaaggccacgccctcagcaagtcagggtcccccactgcacgtgggacagggcaggaacagtgagtgggggcagcagcagctctgaaagcaaacctgtggggtcatggggccccgcccacacagcggggcacaggggtggccactgatgggcttgtcccagcctggagaccctcaaagctggcttcttccagcagctgtctgagagcctggcgcggagcccccacttcccgaccaccttcctcaggctcccggtgccccgtcgccatgagggggttccaggaacccctgccgcccagaacttgcctccagggacacaggctgcctggctggggaccacccccagacacccgggccactctgtggtctatccaacccagcctggggccgcttccacaggcgtcaacgatgaccacatcttcctcctccatggctgcccgcccagagctcacggtggtgcccagcacaccgcaggtgcacagcacatggtggcgatgaagtgccaggcagcagtgtgtgcctcaataaagaactctggggggtctggggagcaaggggccaggaaggggtctctcaagaggggatgtgtcagttgaggcctgacggaagagaacagccggggaaggggcagagcatgtccaggcaggggcgcggcagtgtgagggccccgaggcggaaggagctcgttgtgttctcagacgacatcgggcagaagccacctggagaccccacagctcccaactgcgcaaccggcgagcaggtgcagtcggcccagcccacacgttgcctgctccaccccctccacaagtggatgctgcttcagatgagctgtgtcccccacaggcacatccccgtctgaacccctgcagctgtaatcatgaccccatgtgaaatgaggtcttggccaggtatggtggctgacacctgtaatcccagcatattgggaggccaaggcgggcagatcacttgaggtcaggagttcgagaccagcctgaccaacatggttaaactctgtctactaaaaatacaaaaattagctgagtgtggtggcacccgcctgtaattccagctacttgggaggctggggcaggggaatcacttgaacccaggaagcggaggttgcagtgagccgagattgcgcctttgcattctagtctgggcaacagagtgagactccatctcaaaaaaaaaaaaaaaaaaaaagtgatgaggtcttgcagacgtaggtaagatgaggtcatcctggaggtggcgggccctcatccaatgcctggtgtcctcatgggaagaggaacatttacacacagacacacagagcagaaggccgtatggagacagagacgggaaggcagaccgccacacaacacaggaacaggccgggttctgcggctgcaagccagggagggcccaggaatcaccggccatgactggagctgggagaggcaggaggggcctcccctcggcccccagagggagtggggtcctgcccacacctgcccacgccttgattttggacttctggactccagaacgaagagatgataagttctgttgtcttatgccactggtgtgactggtggctaaatggcaggcgcagaacgaaagaaccagctcagacgacagagcgcctggaactgtggaaccctgtcctgggtacatgatgccaagagctggctctctagataggtttcaggttgggctggtgttcggggcaaagaatggctgaagcttacaccgcaagagacacagttaatggcaagaaaatgacggtgggctgggcgcagtggctcatgcctgtaatcccagaactctgggaggccgaggtgggaaaatcacttgagcttaggagttcgagaccagcctggccaacatagtgagactccatctttacaaaaaaataaaaaattagccgggcatggtggtggtgcctgtagtcccagcaagtcaaaacgctgaggtaggaggatcgcttgaggccaggaggtcaaggctgcagttagccacgatcacgccactgcactccagcctgggtgacagagcgagaccctgagtcaaaaaagaaagctggccgggcgtggtggctcacgcctgtaatcccagcactttgggaggccaaggcgggtggatcacaaggtcaggagatcgagaccatcctggctaacatggtgaaaccctgtctctactaaaaatacaaaaaattagccgggcgtggtagcgggcgcctgtagccccagctactcaggaggctgaggcaggagaatggcatgaacccgggaggtggagcttgcagtgagccgagatcacaccacttcactccagcctgggcgacagagcgagaccctgtgtcaaaaaagaaagctgatagcggcagaagcttgcttatgcgtgtgtgtgtaaaaccaactcttgcacgatcaagggcaggctgggagtgtctcaagtgttggggtctccagaaacagtggaaatgctacagggacagaggccaccacccggcggggcccaccttattccagatgaaggtgcccagcaggttgttgtctccgaaggggttgtcggtgttggtgtagcccatgtactcctcaccccagcccatcttctcccgcttcttgcgctccttggcctccttcttggccagccgccgtgcgcgcttctcctcgggcgtctcgaaggccttcatcagctcctcctgctgcttccgctcctcccgcagccgcagccgctcctgcaggctctgctgctggctcagggcagccgcggccgcccgggggctctgggatcgccctggagacgcggagctggatgctgaggagctaggagaccacgagcgtgcgcgccgtcgccggcgagcccactggccccgtgactgctcctctcctgagtccgactgagaggacccatctcttgagtgccacttgggccgcggggggctccggcttcgcatccctgagcgctgccaccgctcttcctctgaatctgacctgcggagaggaccatggatgcctgctcagtgcctgcagctgtcatctgctccacagatgcttactgggtgcccgtgggggagcaggcactgttctaggttctggggacacagcagtgacccaaataccgatggcttctgccttcctgggctcaccctctggtgggccccaacaaggaagacatcaacaaataaacacaccacgcaacactaggcagaggcagaagccacaaagagtagcaatgccgagcacaggggctggggctgcagggccgaggtcagagaggggctctctcaggagctgacactgagccaaggtctggagggagtggggaggcagcgatgggtggattcggagggagagtgctcgaggcagagcaagagcgagggcctagaggcaggcactgacctgccacattctaagaacaacaaggaggctgtatggctgagacagagtgtgggggagagggaggaggcgcgggcagggaggtggctggggctggtggcgcaggaattataagggtacgaaccaggggacccgaacacatttaggctgtcaagggagggcttcctagatggaagtggtatttgaactagtcccacaggatggacaggagttaacagagtagagcgcagggaatggaagatgcacaacctcaggggtggttcaggggcctttaattttatttattagagacaaggtctactagacacagagtctactagagacaaggtctatatttttatttattagagacagagtctccctctgtcacacaggctggagtgcatgatcagagctcactgcagccttgacctcctgggctcaagccatcctctcgcctcagcctcctgagtagcggggactacaggcacacaccaccacgcccaggtaactctttacatttttttgtacagaggggtcttgctatgttgcccaggctggtcttgaactcctgggctcaggcaagcctcctgtctcagcctcccaaagtgttgggattacagatgtgagccactgcgctcagtcacgtttaggggtctttgtacacagagaactgccaaatattttgttaaatgctctacccattaagctcatgtcaaaaaaatctaaactatgttgaaaccaatcattgcagagcccttaaatattggccacaagttcaactgaattttcgtgaacattaattctaattacatatctagagtggcaaattattgtgaataattccaataccagaaaatggtaggcgaaaaaacacaaagatgacattaacaagacttatgggcaggcgcggtggctcacgcctgtaatcccagcactttgggaggccgaggcgggcagatcacttgaggccaggagttcaagacctgcctggccaatatggagaaatcccagctctacgaaaaaattcaaaaattagctgggtgtggcaacaagcacctgtaaccccagctaccggggaggctgaggctgaagaatcgcttgaacccaggaggcagaggtaacagccgagatcgtgccactgcaccccagcctgggcgacagagcaagactccgtctcaaaaacaaacaaacaaaaaaaccaacaaccgatgagtgaacttggcccagagcggggcaagactggcctgagtgtcagccacgaaggggctgagccagcactggggccccggtctgggaatcagtccctgtccccattttggtttctctgtactggagccggctcaaggcaaatccgaccaagtgccccatctccagaagaaaaggaccatggggaagctgagattcaggcactaggaatcagctgtgagtcctgccagctgacaccgagtctttttccctcccacagcccacctccattagcaaatgttgtctcctctacttccagaatccctctgaaatctacgcactttgcccgctgtggttgactacagcctccctcccatcgagactgccatcatctactgtctggacaattgtgccgtcctactctgatgccgctcctgcctaccccgctccatcccttctccacctcaaagccagaaagtatgcagagttaagtcagtccacgtcactcccctacccaaactcctctcaagactctccatttccctccgactaatagccaagatctaatgtgctgagcacacagggctcgatatgatatgatctgatctctcgttacctccccgccgcctcgctcacccggctccgggctgtccctccaaccgcccggtcccctgcctggaacgcctctcgccttccttccgctgccaggttaattccaaccggtggtcaattgtccccttctctaggaagccctccccgagtaagtcgggggtttcccggttccccgggatctccaaccctcggtcgggcgctcctgaggtaggagccggatccccagcgctgctcccgcagcgaccccacctgcgctcccggctccgccgcctccgtctgcgccgtccctcgtcctcccggcgccgtcggtttcgccgcccatggctcctgctccgacttcggctcccgctctgactctgccgccttcggccccggcgacccgcggaccgcgagcgcgagcgtgtgtcccgacccatcggctgggccagtggccgcggcaccaacaccaatagccgaagcctgcgctgggggccttcctcgcccacggcgctctccaggctgccccgtttgcgcctgagccgggaaagagcaacccatcccgtcgccccagcccgcaaggactccgacaccccagactttccactacgtctgcaaatgtggaccgcgtgattgactccagtgggattgttgcctccagggtggcggagtctcctttcaggcagtgctggaggcagccctaggcgggtccccacgcctcagggggcctgagaaactgtgggcggggcaagggcaaactaggaaccttgtgcagggaggggcctgccgaggcgagaccaataagaagcgggtctaggtcggaagtagcgcttcattggcgtggccaggggcgtggccgaggagaggcgtgtccggggagcgaggtccccgaaaggcgaggaaccgggaaggtgttaggtgccaggcagctccagagggcagagggcgggcgcggggacagaaactgaaaagccttcttatgagagtcatcgttatgctccaccacctgccaatgaacacctatgtattttgggagttaagctttaaaaaaaaacaaaaactttgataactccctgtattcccccatcaacccattttagagacggggaaactgaggctcagagagggaaagtcactcttaacacttgccttctcaacccaggctgcccagctttgtggtgtgggtgctggggacccgtgggagggttgtgagcagggtttgggggacttgctgttgaaacaagtttggcgtgggaggacggacttcaggggcaaggctggaggccagagacctagaagacgctgatgtcccatcctgagctcccctagcccatggtggctgctaccaccaccccgtgcagttctaaccactcggggctgggaaggcctgtttatggaggatgatagtaatttaagctaacttttaaaatatttatcttggccgggcacggtggctcacgcctgtaaccccagcactttgagaggccgaggcgggcggatcacctgaggtcgggagttcaagaccagcctggccaatatggtgaaaccctatctctactaaataatacaaaaattagccgggtgtggtggcatgcacctgtgatcccagctacttgggaggttgaggcagggagaattgcttgaacctgggaggcggaggtcgcagtgagccgagatcgtgccactgcgctatggcctcggcgatagagcaagactccgtctcaaaaaaaaaaagaaaattaaaatgtttatcttgagtggggtgcagtggctcatgcctgtaatcccaacactttgggaggccgtggcaggtggatcttgaggtcaggagttcgagaccagcctgtccaacatggcgaaaccccgtctctactaaaaatacaaaaattagctgggcatggtggcatgcttgtaattccagctactcgggaggctgaggcagaagaatcgcttgaacccaggaggcagaggttcctgtgagttgagatcgcatcattgcactccaacctgggcgacagagcaagtccccgtctcaaataaataaataaataaataaataaataaataaaacgtttatcttggaatacaacttcataacatccccgtaaacgctggctttgtatgctttgcttggtgttaaggcaaggatggaaccttacagaggaagaagagaccatctcctgccgctctagatgatgaccttgccggtcctgagatgtgggttgtcatgctgatgggatggcccaaaacaaagcgaaggcctgaccctgtgcttcccaaaattcagatgcatccttgcagcacattaagagatcacttgcatgggccgggcgcggtggctcagtcctgtaatcccagcactttgagaggccaaggtgggtggatcacctgagttcaggagttcgagaccagccttgtcaacatggtgaaaccccacctctactaaaaatacaaaatttagccgggtgtagtgccaggcacctgtagtcccagctactcaggaggccgaggaagaattgcttgaacctgggaggcggaggttgcagtgagctgagatcgtaccattgcattccagcctgggtgacagagcgagactccatctcaaaaaaaaaaaacaaaaaaacaaaaaacaaacttaaaacaacgagatcacctccatgttcagtttataaaacagctgtgctgaaacgttccaacggctcccttacagacaggatcttactttttttttttttttttttttgagacattttcttgctctgtcgcccaggctggagtgcaggggcatgatctcagctcactgcaaactctgcctcccaggttggagcaattctctggcctcagcctcccgagtagctgggattacaggtgtgagccatcacgcctggccaggatcttgttttcaatgtagtttctcaacctgggagtccaagataaatgtgttcccttcaaggggtccaaacgtgactgaattggaaccgctctagcagaacaaatacaaactttggggggctgcaaagatgttggaaacaataaaatgttttctgagctgaactgggacctgaagaaggttcacagctggtaaggtgtttgggtcctattactggtatcagcatcaatctcacaaaggtttctctcttctctaagattcaaagtcagtcctcaggccaggcacggtggcttacgcctgtaatctcagcactttgggatgaggcgggtgggtcctttgaggtcaggagtttgagaccagcctggccaatgtggtgaaaccccgtctctactaaaaatacaaaaaaattagccaggtgtggtggcgggcgcctgtggtcccagctactcgggaggctgaggcaggagaatggcttgaacccgggaggcagaggttgcagtgagctgagatcactccactgcgctccagcctgggcaacagaacgagactccatctcaaaaaaaaaaaaaacaaaacacaggctgggtgcggtggctcacacctgtaatcccagcactttgggaggccgaggtgggcggatcacgaggtcaggagatcgagaccatcctggctaacatggtgaaaccctgcctctactaaaaataaaaaattagctgggcgtggtggcgggcgcctgtagtcccagctactcaggaggctgaggcaggagaatggtgtgaacccaggagacggagcttgcagtgagctgagattgcgccactgcactccagcctgggtggagagcgagactccatctcttaaaaagaaaacaaacaaacaaacaaaaacagaaaacaaaaaacacagaacaaagtcactcctcagactcccaaccagacctccggaacccacagaaaggcaaacaggcggatgcttattacccgatttattagagagatctctaaaaagacggggtgtggcgggggtaggtgggcgaggaacctgggatgcaaaccagtgtttggggccaggagtggctgtatggtttcagaggcgcccaccactctgggtttgagggacacagcaccctcgtctcggcgctttggattgtcacgcaccagaccacggggcggaggaatggagtggcatccctggggggagttaagacacacgaggtttgcagtttcattttgtttcagaatcagtttggccataaaaatgggactgggttggggacaggcggagcgattgaaccaccggagatgaggaggaggtggcaggcgcctctcctggggtggggactgagggctgtggagacagtaccatggtgaaggaccccatggcaatgggagtattgcactgagccaggtttcgggggaacggggacgtgtcgggatggcgtagggggacagagcctggcaggagacacatggaagtttccgccttgtcagtctcagagcaaacgccttttagtctttacagtacaggaatttggacactgcccacgttctcagtggacagcagccatcagaggtgacccaggaggggaagtgggcattggtcaccaaggtatttacagacttctatcatgggggacagcggggtgggtccagcagcctccctcgcgggggatctgagggagaccgagttcgctaaatattataaataggtcttgccgtcctcctgcccccgcccctcggcacagtcagtggagcacgtcagcctcggtttacagttctctgaaaaggaaccaaaaaacacaaccaacaccaagtatatctccaaaagggccttggagacaacacaagaatggaaatgaaatggtatccacagaggtttgcacatttctcctgcaaaggcgcgtcggccgggcactggtgtcccgtgtcactcagcggagggaggctgccctggacgcggtgccgcccgcccggggccacacctgctgctccgagtcaccccacaggctcttggcgtctctggtgccagggctctgggcagggcgactcgaggactccctgggaggactggtgtggcctctgggggttgggcctttgagatgacaatgcccctgtccctgctggccatccaggtcccagacaccccttctgacctctgcccctgcctccccggggggtgcctgctgggtgtccttcggagggacagggcgggggctgatgggtggatgcccggtgccagcagatgagcaccaggctgtgaactgaggccaaggtcgcttcccagggctggacagaccctctgagcacgcagggaggaccccacgtgggcttgtcctgatggatgctgggagccacgcggctggccggttcccgaggagggtcggcccctctcctgggcagagtggaggggctgctctcgtggagtgtgtgtcctcgctggggacctcggggatgggtccggcttctccacagcaggggccttccgggcgcagcgtgtgggctgtgcaggaggccgacgggacgtgaacagcgggtggcgtggcgtcatacggaggttgtaacagacaaaacacagagccctgcctgggaggttctccggccgtctcagaccccacaccaggctctgccaggtctggagaggaattcttcccaaaggtgcagcttccactccagctcctcacatcctgggcacatcttggaagtgggggattcccacagccatcaccaataagcccctctcaggggtcctggggaagggcagggtgggtgactctgccgagctctggcctccaaccagcaccctctgagcgcagcgggcccaggaagctgccccagggcagtctgggctgagtcccaccactgggagcgctgccctcttggagggtgatgagtcggaaacaaagtcttctctcccctcctcggagacatcacatcacttaaacaagaaagaggcggcggacatccacaccagtcctgaaggagactcctgtggagccgggcctggccccctaggccatgtctccacgtggagggggcggggagcctgaccttccgccctgagctggtctcctgtggcccaaggcccggcctcccgctctgtcctgccatggagaaaacgtctccgttgcctgggccctccatgccagttgctgagtggcctacgttggaagagaaggacaagtccccagccctgagctccgccagcgtgggtggcagcctggggaagaggaggcctggccctccagctgtggtgggtctggattggaggcgccagaggtttttgctcgaggggcacctgggaggtgggcgtcagggccccactgcggcgggaacatagctgctgagtggccgcagtgcttggcagggcgagggctgtccccacagtcgatgttcaggccagatgtcctgcactgaggcccccaaacccaagctgagggcaggagggtccgcttcccacgtggatggaggcagagttgctcgggaccccagccgtcccctctgcaggccgatggggcccccggggctcaggtccccagaggccaccgcgaacagcctggcttcttcctcaggacacaggcaggcacagcagagaaccaaagagtgcagtgggcaggggctcttctccctctggttggtttgtttgtgtcttttttgttcttttcctaaaacggcacacacgtgcttccgtctctgtgccaaataaggactcaaatgcgattggccgctcgggagggtgggtctcacaggggcaggctgccgaccggggtgccggggccctgggaggcttgtcggggaggggcccggccgtcggcatccgtgcagggggaggacgaggtccggtggggcggcgaggcgggcatctcccgagctctgggcctcagcggggtgggcagcgccttcgggggcagccggagcagaagtggagctcggctctgggtcgggggctgcatagaaattactgcaagagcaagaggacaggtgaaggtgggcggggcgagggcccaccccaggccccctgccagggactggcttccttgggccaacacaggccctgagacacttagcccacggccacctcagagccagagagcccagggtggagctctgggccacctgtgccctcccgccccgggcctcagtccctgcctatcccagtagctggggaccacgctcagtagaaccttggagcccacgggaccggcgggtgcacctgggctgcacttactgtgtcgctctcgccgtcggaggccgggggggcctgggcgctatagtggagcggggagtacacccagctcctctcatcggtgggctggcaggtgggcgcgcgtgcaggagggcgcggaagagcagggtgcgaggaggtgcaagagaggcagagggaggaaggaagagacaggagaacataaaagaggcgaatcccccatggaagacgaggggtggctcagcccagctgccctctctgacccggtggacttgctcccaacctggacgggcctggggcctcagctcagcttggcggggcggggcacggcgggcggcagaaagcagttagttcagtcgaggcagggcctgagatagcaggtgacagagccggcggaagcgggtgggggtcgcgacctggagcaccgagtgttcctcctcctcctcctcctccacagcccggccccaccacagcccccaatcctgcctgtgccacgggcaccagcgcacaggctcctggaagctctctatgggggtcctgggaggtcggggtgccggacctacttcccaacccagaagccttttgggacctgaatatatggctgcctgcgggcagggccagtcccctctgccagcacagacgtgctaggagagactgaggctcggaccacccaccctgcaagagccaggagacgccttcctgagcagcagggcagagtgagggccaagttcagggctaggcacaggcagggccgtgtgcagggacacggacagctcttcccagctgtgcctgcgtgaggggtcccaggtctgggtgggatctggggagggagggagggtgcgttcctccaacacctccgtcccgcctcctgaggagcccccaccccctcaagctccccctgcttctcctgcccctaggctgctctgctttctcagggctccagcctggccgccctgtcttccttgttgtgtcctcctctctctcgggcctctgtcaccaacccagccttcaacgcccctcccggcacagatgacctgcgaatttccaccaggcctggcctcggcctgaagtgccaggcctgaatacacacctgcctggccacgtccacctggcggccctcggcccctaaactcgccacagtcacaacccagtccatcaccccaagacccactgctcgtccttccagtcaggatgacgctgcccacctgctgcccaggccaacccatgcctctgccagctcccagttgcccagcctgggccagcaggggcctcccttgtgctccaggtgagcccagacctcacctgcaggagcactgcctctccctgcctcgggctctgcctccatgctccctctaaagggcccacctctgtgctcactccaccctgcccgatcctacagcttccacaagacccctgttcccgggccctgggcaccgagggcagcgcactcctgccctgcgaggccgcatcgcggaggactgactcctgcactgaggggccaggaccccagcgcaggccttgcctgttcctccagggtagcaaatgcagcctggaatccctgacgtgggaatggcaggtcaggtccacccaacgtcccttgagagcccggcatggggagcctatgtgggtgctcagtactgatttggtggctgcactgatggatcccatggggacttgaaaatgtggggccaaaacagggtccccacctgagccctgaaagaactggcccgcagggaggagggtggcagcagccacctcagagccgctctctgggaggggcatcccgggcacacacagcacgtgggcagggatgacagtatccttctgctacagcattagaaacggggatacaggccaggtgcaggagctcacgcctgtcatcccagcactttgggaggccaaggcaggtggatcacttgaggtcaggagttcaagaccagcctggccaatatggcgaaaccctatctctactaaaaatacaaagattaaggccgggcgtggtggctcacgcctgtaatcccagaactttgggaggccgaggtgggcagatacctgaggtcaggagttcgagaccagcctggccaacatggtaaaaccccatctcttactaaaaatacaaaaaattattggggcatggtggcaggagcctgtaatcccagcaactcgggaggctgaggcagaagaatcgcttgaacccaggccagaggttgcagtgagctgaaattgagccactgcattccagcctgggtgacagagtgagactccatctcaaaaaaaacaaacaaggctgggcgcggtggcttacgcctgtaatcccagcactttgggaggctgaggcgggcagatcacgaggtcaggagattgagaccatcctggtgaacacggtgaaacctcgtctctactaaaaatacaaaaaaattagccaggcatgatggcgggcgcctgtagtcccagctactcgggaggctgaggcaggagaatggcgtgaacccgggaggcggaacttgcagcgagccgagattgtgccactgcactccagcctgggcgacagaacgagactctgtctcaaaaaacaaacaaacaaaaaactcaaaattagccaggcatggtggcaggcgcctgtaatctcagctactcaggaggctgaggcaggataattgcttgtacctggggggtggaggttgcagtgagctgagatcatgccattgcactccagcctgggcgacagagcaagactccgtctcaaaaaatgaaaaaaaagaaagggcaggacaggtggcttccttgtcctgcaggagttggggggacagagagggacaccctcagccagcagctgggcagacaggggaagtggggggcagtagcagctgggacccagaaccgggtgaccccaggaagaccagaaccaagggcacagcctcttcagcactcaggccttggggtgctttcaatggctgccctgcctcccttctggcccccacacttccgcttctgctgtgcctgctgccgagaccaccctccccacgtctgccccttcaagtcaggtgtttttcaaagtccaagcacccccctccgtaggcggcctctgcgaactgctccctgcctatggtggggtggccagcagggccgctgggtctctccagtgctcctcctcccagcaggcccctctgggcagctcctggacgatctccggggcacggcttcgcggtggctggcttcccgctggctccgtgggacggagctgcctagagcagccggggaagtggtctccacctcttggggtcactccacagtgcctggcacacagaggtgctcggagaggtttgctgatgggcggggagtcacggcggcctcggcggaggctttgtctcgaggggacactcctgctttgggtctgcgccccgttctggctgtgcggtgctgggcaggtctcttaggctctctgggccccttgcttattggtcataatgacaacagcaggccctgaggatctcacagctacgtggggcccatgtggcgtcccagggggacctccttgagagcttggggatctggattttgactaaaccgtgtggtctcccaggctcccaggggagccgaggcctcagcgcctccatctgtgaggtgggtgtggagagaccatctcctccccgtctccatggccctgcggttcagagcccggccctgcagccactctgctgacctgtgcaacctcccctgtgcagccagcggggccacgggcagccaggtctgcacgagtgagaagcgtccacccaagacaccctgacacgagagggctgggtccaggggcagagaggggctcgctggggtctggccggggtccgaagcagaccctgggcctcagctgtgcacctggtgatggtgctgccctatggagcgcccggttcgacgtgggaccgaatgacattcccagtgacgcatgcagcccagcgcctggtccggggccagcgtggctgacctcaattgcagccgtgatttacccaaagcccttctggaaaacaactgacgtcagacactgagcttccggccggggacctgcggctccctgctgcccgaggggcactgccccttctccccagggtggccggctgcggtcacttacagtccccgaggcgctcagcgtcacggcccgcagtcggcgatggcggggagagtaaatccagtacctcccatccgtgaactggacggggcgggccgggtgggccggaggaggaaggaaaacagaggacagcggatgaggcggccacccccgtggtcgggtgggagaggcggagggaggtggcggggagcaggtggggacagctgactgccaagcagaaggtggggggtgccggggcaggggcaggaccgaggacccttctcccttctctgctgcccacctggcagggcatcaggacacagacacacagcacgacatggcccccaggccccccgtaccatccggagaccaggacgcgcacaaaccagtcccaggaaaaggggtgacgacgtgcggtgggtaggggcacaggcacgcggcccgtccctcccttctccagggccaggtgggtgcatggggaccccagaggcgccactggagacagagcaggggagttagttatgaagcagcgaggaggtgcccccacaacaggccctaaggcctggtgcccgtgcccagccctccttcccagggggtgcagggtgagaacaaaccatctgggaagtgggctgcagcctccggccctccctgtgacctggggctgcctgatctgagtgggaccactggggagtggagacgctgcctggacattccaggcctcgctggccgcccggcagccacctcacccagaccctggcaagggagagcagggatcccaggtccccagggccgggcagaccctgccctgcccagtagcagccacgagtccccagcccacggcgtgggagcgtgaagccctcctgccactgcccggtcccccggccctcctcaaggataagcccacctggccacgcccacggcaacagggagaaggtcctgccgccacagccctgtctggacgtctaggctgtcaaggacacaggacctcagcctgtgccagggcctcccgaggggccaagagtctgaggactccggacgacttccagggagacgggtggcacagaaggtgccgtgggcacaaggccggggaaggggacaggggtggctctggggcctcagaaaggcctggtttggaggagcttcccaccccatggggttagaccaggaagagaaggtgggtgtgaacgtggctggtgggtgcgtgtgggcgtgtcgtgagagtgctggctggtgagagagcatgtgggtgggtcgacagggcacactcacgtgcctgtgtgcaggtgtgtgtatgcggtgtgcacacggtggagcgtgtgtgagagagagtccggttgacgagccggcggcaggaggagcccggggcacttacaaagtagatgtcggtggcgggcgcgtcctcctcgtccgaggcctggctggcaggtgcgccctcctcgtctgaggcctggctggcagtttctacttcaacagcagcagaggcaccggccggggaagcctccaccctggggacaggagtagacagagggtcttgaccctcaggccccacacggagactccccgcgcccccactcaggacccaggcaggggcttcatacggtcatcacggagatgaaaagccaggcagctgaccacaggccgcgcgctcctgcgctgccatttatcgcaaatcagaacaaacctccccaagaagcccctcatgctggccccaggagtgacctggagtgacccgccagcccgctgacagctcggccctgccactcccagctcagacacacacacctgtgggcacgtgctggcctcaccctcaccggctgtgccaccctgggagggcctgttcctcctctgagcctcagtttcctcatctgtcaagtggggagagatggcacctagccgctgggatcagagcttcttccttctttcattgatttgttttttcagacaggccctggctccatcagccaggctggcgtgcagtgctgtcatcacggctcactacagcctccaccgcccgggctcaagcgatcctccaaccttggcctcccaagtagctgagactataggtgtgcactgctacacccaactaattttttttttttttttagagatggggtctcactatgttgcccaggctggtctccaactcatggggtcaagcgatcctcctgcctcagcctcctttaggagggatcacagacggaagcctccgagcccagcctctttgttcttttcactgagcacttactacatgccagggctggctcccgtgattaacccactgagtctatcatgggggatggagagggtgcggctactgcccctgtgttgcatttgcggaaacggaggcacggagaggaggtgaggaacggccttggccttggctatggccacacggtgcatcgtgttcatcccaggaatgaggctaaacatgccctcctgccatgtcggaggtacagttcctttcagcaaaacctgaaatttcacggtgcaaggtttggcaatggcaaagagttgacagtggcaggagcactgggtggaagataaacccccagggctttagttttgggtctacgctgctgtgagcgctaaaaaagctctcttggaacaaaaatacaaaagcatctcaggcaaaaatcattacaaaggcaagaagaatttggtaacagtgcaagcatgggattatacacaccagacagatgacagaaaagtaaaaacatacaggggccgccacggggctcacgcctgtcatcctagcactgtgggaggccgaggcgggaggatcacctgaggtcaggagttcgagaccagcctggtcaacatggtgaaaccccatctctactaaaaatacaaaaaaattagccgggcgtggtggtgcatgcctgtaatcccagctactcgggaggctgaggcaagagaatcacttgaacccaggaggtggaggttgcagtgagccgaaatcgtgccactgcactccagcctgggcaacagagcgagattctgtctcaaagaaaataataataacagcagctgacaccatatccccaaaagggccagaactattgtgtcctgtgttttttaaaaaaacagatatttcttttaagcctttttcttcaatacaaaaatcaataaaattaatcccagtactttgggaggccaaggtgggcagatcactcgaggtcagtttttttttttttaggtggagtcttgctctgtcgcttaggatggagtgcagtggtgcgatctcagctcactgcaaactctgcctcccgggttcacgccattctcctgcctcagcctcctaagtagctgggccgacaggtgtccaccaccacgcccggctaatttttgctattttttagtagagatggggtttcaccatgttagccaggatggtctcgatctcctgacctcgtgatccgcctgcctcagcctcccaaagtgctgggattacaggcatgagccaccgtgcctggccaaggtcaggagtttgagaccaagcctgcccagctggctgatgggagaaaccctgtctttactgaaaacacacacaaaaattagccatgcgtggtggtgggtgcctgtagtcccagctactcaggaggctgaggcaggagaatcacttgaacctgggagacggaggctgcagtgagccaagattgagccactgctctccagcctgggcaagagagcaatatcctgtctcacaaaaaaaatttaaaaaattaaaaataaaataaaattaaattaataaatactaaaaaggttaaaaaaaaattagttaaatacttggaagttcagagatgctcttacacaacccttagcccagggtctcttgcctgggccctgtggacactggaaccaggtccttctctggggtggggccatcccgggcactgcaggctgatgctgagcagcgtccctggcctccacccactccatgccaggagcaccccccagttctaacagtcacaaatgtccccaggcatcgcccagtgtcccctgggggctaggatcaccccggctagtcgagaaccactcccttcaatcaaaaaataaacttatgggaaaatccaccatctgtgaatacaacctagtaagaaagaactgcttcatgatgaaacctcggggtgctcttggctcctctgggcccgcagcaggtgggcgccccgacctcccgccgaggccgtgctcaccctgcgtcctcctctttggggaccacaatctccacgctgcacgcaggctccacctgcactgtaatctgctgcagatcctcttccgcgggtggctcctcctgcggcctgcaggcaatgggaggttgtgcctcggtttccctcctcacttcccccatcctacccccaggagtgcccagtgaactccagggccagtcccagaggggagttgggagcctcctgattgggtctgttctttctggctgtcactcccagcccggggactgtccacctgggtcccttggtgactgtggtgccagcagggcctggggtgtagcgggctctgggggcatatgagcaaatggcagccccgaccggtgtgggtgccacagaccctgcccaccctccaggcagtgcctgcacctggcagccgaggccctgacacaagtgactcagtgtcccggccgccgggcctggccatgtaacatgtctctccaaatggcacgctagactgcagggagggtcacatcccacccagggcaccaaggggtttctttcaccaggcggcagcgattaaaacacggttaagaaaagcaacaccgcgccactgccccagtgttcacaagagtgagaccccagggacctcgcaaatgtccccgagggctgggcacttaaagccaggtgcagtccatgggatggaaggacggcacgcaggcgtgacaggaacggcgcgcacccacccctgagatccccgtcagtcgagtgacaacagcaaggtgtgggcggcgtgcacgggtgtgcccatttgtgtcaaaataaaagggaaccacaagcctggtgcacgtctgctgtgttcccagaaagtatcttccaagagacaaaacccacagtcccagtggttgctcctggggaggggacaggccgtgggcaggagggggcgcatttcacgatattccctcttgtatcttgttttaagttaaaaaaaaaacttaatagaagaagaaataaggaaggatccacagaccagagctgccctggctctggctgtaagaaaaacaaagtggctggaagattgtgtgcggtgctagggccgagtgctacaatcttaaatctgtccccaggagagaatgggcagagagcagaggggctggggggcgggaaacggagctgggagctgtgcaggaggagctggtgagacccagggaaggaagggggttgggtctcacctgccatcctgtccagacgactgtgtgcgccgcctgcagagatacagcaaacacgtgacacccagaaagagagtggcccgcctgctcagtctacctgccttgcctacccgcctgcctacctgccccctggcagccctgcccacctgtacatatgctcctccctcccacacattggatgctccgcccccgcgcacccacatgcagtgtatgtacatccaccgtacatacgatgctccacccacatgcacagcggatgccccgcccacatgcagtgaatgccccgcccccacgcacagcggatgccccgcccacatgcactgcggatgcctcgcccacctgtaccgcggctgctccgacgtctccgagggggaccgctcaggaatggagagggatgtggatgacagagtcgtggcaatggaggctgtagtggcttcttcgaaagaaggtggcgtgcagggcaggaggtcgggccggcctgaggggagaggactgtgggcaccttgcggagcctccgagcccccaaacacacagtcgattctccctgaggcttggctcaccctgggaacccacagcccagtgcccgcccgcctcccagacactcccacctccccacacggcagggaaggacgacgttccccctcacacaaaggcttctgaccgctctcaaaatagaatccagacagcccagagggccctgtgcagcctggccccgtcccctctccactctccctccccgctgtcttcccctccactgctctcttcccctccccaccccccctcccttcccctccgcgctgcttggccacacgggctccttgctgttccctcagcaggtgtggtcctgccccagggcccttgcatggctatgtcccttccttcattccctagcctgggggctgcatgccttcgatggcatcctggtgcacctcagatgacagtggccgtgagagaaggcgggagctgtcaccaccccacctggtggagccttctatactcagctccccctgggctcttccctggggcggtcccagcagcccccactccctgggcaggcggccctgcagatccggagggggtggctgagcgatgggcactcaggatgaggcggcaccccacccacggggctgctgctggcaccccctgtagcgcccacaagcgcactctgccctctgcccctcaccttcgtcctccagcgtggggtagctgcgggccccccgcaggtcgtactgggcctcctcccgctcgctagggatctggctggccgagaaggcagcggtgggccccagcggtttcacagctagcaaggctccgccgcgccccttcttggagggcgaggacttcagggctgcagggaagggtgggggttggtgcttggggttgctgggggctcatagcaaagcccagacagggccgccgcccacatataccccacgtccctgtggcccaccagacccctaccggtccctgaggccaggaagcaccacaacctcttggtggaaaaccggggtctgcctggggagggactgcgagcccgagttccctgtcctgcccacccgactgtctctatgagacacactgggacctggcacagtgcctgcccctcctgggatcctgcagaccagtgactcccatctaatgagctggccagggatgcctgcaggcttcaaccccttctatgtgcggcccagcccgggcagggcccccactttcagatggacactgacagccttggggagcaccaggtgttgtggttagagaagcctgtggctcagcatgtagggcctgagcgcagatccaggctcacccgctggctgtgcggctcggtctctctgggccctgggggccgaccttagcggtggggtgaggtggggcaggtgatgtcccgcacagggccaggcctgtcctcagtgctgtgtgagctctgcctcctcaccaagctcttgtgacctctgcccccagaatgacccacacagctcctggtaaacagtaggtgctcagtttgccttgtgcagcttcctacaatcaccaaaggctggcaaacagccctggatgacggaatgatcctgtggcatcggtcccagagagtggggtgtggggacaggctcaacggctggctctctggagacagatcctgacacgtggtgtctgccaattcccacggtgttgatgagagggggtccctgacctcgaggccgtgagcaagtgtgcaggccgggaagagcagcctgcctgcaagcgctgggcactggcgtgcctgtccctgccacctccctgcaacccccgtgggtgcggacccgcagatcattcatgccccccaccagacacttcccaagcatctctgtgggccaggcctgtgcaggatgctggggagcccgggagccttctggtggggagggtggctgagaaacagaccccaggggggaatccatctggcagcaggttggccacgggctgaggtctgcacaggggcctggaacccagagtctgcgtccagatgctacagtggcccatgaggggaagctgagccctgagagatggggacctcccccgggcaccctgtgggtgaatcccgagtccccaccttccccaccactgtttgccctgggaccttcccgaccatgccctgctgggctagcctcctgcgttcccctgcccggggtgcgtttccttggcgatggtgatgctgtgggcagccccacacactgtgagctatctgctgagtcaggcccacccatcccatatataaacactgtaccctcacagtgctgtgccaatggggaaaccaaggcacagaggcaggtgcctgctcaaggccacatgggcaggacgaggccaggctaggattcaggctctggcggtggctccagacccgtgctctaccgctgtgcagagcaaatatcccgactaccctacctccggatgaggcccggtctgaggggggcacaggggctctgagtttactgccctgcccagggggctctcggcctcccgcagagtccctcctgccccacggcgctctgggccttccccagggtccctcccgccttgcggggctcaggtggcttacaggagttcttccgaaagaccgtgttgctcatgaacttgaaaaagcgctcggcatagaagctggggcggtggacggacaccgtgtcctggaagagagttggggggggtgcccgggggcagagggtgcatcaatcaacagctggggacagccccagacagacgctgtatgtgtgtggggggcaccttctgtgtgaaaaggctcgagatgggtccatggcgccatggcttcctgggaggggctcacggaacagggaacagtggctccctctggggagggagactgggtgccagggaatgggtggaggcttttccactagagacctgttagcatttttgactttttaaaccagctgaataaagtattccggccaggcacagtggcccacgtggacttgtaggggaggctgaggcaggatggcctggctggggccctgctgggatgtgatctcggcctcccagaatgcaacctcctttcccagcctccttgggtgaggagtggccacgtaccaggactgtgaacgactccacccccgcaggctgcagtgggaggtggtgcccggccactctgggccaggggacaaggacaaccccagggacatgcggcggcagcacaggacaccctggccagcctcgtcagagccgagacagcgctcctatctgccctgggcagcaggttccgggccttggcaaggtttaagacatccccagaggcctctgccagctgccatcctgacccgctcaaggcttattctggaagctcctgcctggaccttctacacgctcttttgaaaaatgggggtgcctgttgggatcttggattctacaggctgtggtcacacagacgttagtcctcagtgcctggccccaggcggtactctgcgtttgtggagtgacggatgggaggaaggctgggacgacagacaggaggacagagggaggaaggatgggaggaggggtgcaggcactcacagagggaggagggatgggaggaggggtgcaggcgctcacagggaggaaggatgggaggagggtgcaggcgctcacagagggaggagggatgggaggaggggtgcaggtgctcacagagggaggagggatgggaggagggtgcaggcgctcacagagggaggagggatggggggagggtgcaggcactcacagaggagggatgggaggagggtgcaggcactcacagaggagggatgggaggagggtgcaggcactcacaggaggaggagggatgggaggagggatgggaggagggtgcaggcactcacagagggaggagggatgggaggagggtgcaggcactcacaggaggaggagggatgggaggaggaatgggaggagggtgcaggcgctcaccccatcgtggacgagggccttccaggtgtgctccagtttcttgatgaacctgtggagagagcacccggagtggcagctgacatcagccaagcccatgccaggccacctcactcaggggccactgtgcaccccccaggacactgggccatggcctcaagcagtcgtggctgtcaaaactcagggtggcaggtgctcctggcagggagtgggtggaggctctctgctcagtaccctgcagggcccaggacggccccaccccagagaaccatctggtcccaatgtccatagtaccgagggggtgactgtttttaaacattctagagccccagctgagcacggtggctcacacctgtaatcccagcactttgggaggccaaggcaggcagatcacctgagatcaggagttcaagaccagcctggccaacatggtgaaaccccatctctactaaaaatacaaaaattagccgggcgtgctggcgcgtgccagtaatcccagctactggggaggctggggcaggagaatagggtcgactcagaaggcagaggttgcagtgagccaagatcgcaccaatgctcttcggcctgagtgacagagcgagactttgtcttaaaacaaacaaatgaaaaaccaaaaaacaaatattcgagccccaaagtgaggcctcaaacccactccttggattttcttttttctttttttttgggacagggtcttgctctgtcacccagcctggggtgcagtacggccatcatagctcactgctgcagccccagactcctgggcccaaggaatcctcctgcctcggcctcccaagtagctgggactgcaggagcaccaccacgctcagctaattttttgatattttgtagagatggggtcttgctatgttgcccaggctggtctcaaactcctgggctcaagcaatcctcccgcctcggcctcccacagtgctagattacaggtgtggaccactacgcccaactcactctagattttcaaggcgaccaaacaccttccctttagggctcaagaaggggcagccaagcaagagctttccaggttgaggaagccccgagagctgctggtgcggctgtttccacgggcaagcgcctctgtgcatgggtgtcctgggggcgcccatccacctgtgggactgcagacccaggcgcccacctgtggggctgcagacccgggcgcccacctgtggggctgcagacccgggcgcccacctgtgggactgcagacccggggcgtccacctgtaggactgcagacccgggcacccacctgtaggactgcaggatgtcgatgatgccaatgtgcagcagcagccgctccccgcggccgttcacagcggggatcccgcccatcctggggagagaggccgagggtaccatcagcatcccgcagagctgggactcggggcaggcggggctggggactccagggctagggagtccatctgctcctgtgggtggcaacttggccaagctctcggagtggggcctggcacccgggaacctctgtcctgacatccctccatcacccccagcctcaaacccaggcccaggcactgctgaggagtcccagctaggaggcctgggcacataccccctacacacacgtgtgcctggacacacacatgcacacacacgcacactgcatgcccaggtagggccacggggtctcaggtacagactggggagttaattgtcacccggcaccatgcccacacgtcccctgcccagcgcgggagttaactgtcacccggcaccatgcccacacgtcccctgcccagcgcgggagttaactgtcacccggcaccatgcccacacgtcccctgcccagcgcgggagttaactgtcacccggcaccatgcccacacgtcccctgcccagcgcgggagttaactgtcacccggcaccatgcccacacgtcccctgcccagcgcgggagttaactgtcacccggcaccgtgcccacacgtcccctgcccagcgcgggagttaactgtcacccggcaccgtgcccacacgtcccctgcccagcgcgggagttaactgtcacccggcaccgtgcccacacgtcccctgcccagcgcgggagttaactgtcacccggcaccgtgcccacacgtcccctgcccagcgcgggagttaactgtcacccggcaccatgcccacacgtcccctgcccagcgcgggagttaactgtcacccggcaccgtgcccacacgtcccctgcccagcgcgggagttaactgtcacccggcaccgtgcccacacgtcccctgcccagcgcgggagttaactgtcacccggcaccgtgcccacacgtcccctgcccagcgcgggagttaactgtcacccggcaccgtgcccacacgtcccctgcccagcgcgggagttaactgtcacccggcaccgtgcccacacgtcccctgcccagcgcgggagttaactgtcacccggcaccgtgcccacacgtcccctgcccagcgcgggagttaactgtcacccggcaccgtgcccacacgtcccctgcccagcgcggttagtgaggccacacgtgcagcagtcatcctgaagccactgggacccagacccgctgggctggcgccctgcacgctctgctcacgccacaggctggtacgctcacctgctcccccgccaggccagcgaagaccctacaaacgccaggatggtctgagggggagctgtgcctggccttggctcccgcacccccccgcagctacaccctggttggggccccggctcctcctctgccatccatgggaaataccaccaccgctgcaaaccaaagcccagctggtggcctagtgccagccagtgccagccagcaccgtccctggggccaggccaggtggaacttggctccacaccttcgtggctgcactggggaaggctgccccccaacctaggagcctatttcctcagctggaaacaggggaagcccacctccctcctccaaggccgctgtgaagactgaacaggtaccaaagtgaaggctcgggcctgcccccactgtcagggtgctgctgtgaccagggcacaatctcagcactgctatacgacacctgtctatcccgcatccggggccatgtctggggacatctgtggttgtcacaactggggggtgctcctggcccggagtgggtggaggcccgggacgctgctcagcaccctgcagtgcccaggacagccccaccccagagaatgacccagccctcacatccagtgtcccaggagagctctgtgagtatctccccagccaaaccctgagccctgtgagggcagggcctgcctggtccctctgcccctggtgtccagcagacatgactgcaggccactgagatgtggcctcctctctccaccaccgttcctatcttctgtggcagccactttttttttctttttggacagagtttagctcttgttgcccaggctggagtgcaatagctcaatctcagctcactgcaacctccacctcctgggttcaagcgattctcctgcctcagcctcccaagtagctgggattacaggcgtgcaccaccacgcccagctaatattttgtattaagcagagatggggtttcaccatgttggccaggctggtctggaactcctgacctcagatgatccacctgcctcagcctcccaaagtgctgggattacaggtgtgagccaccgcgcccagcgtttttttttttttttttaagacagggtctcactctgttgcccaagctggagtgcagtggtgtgatcttggctcactgcaacctccgcctgccacgctcacgcctgccacgccttcagcctcccaagtagttgggactacaggtgcacgtgccaccacgtccagctacattttatattttttgtagagatggggtcttgccatgttgcccaggctggtactgaactccggggctgaggcaatcctcccaccttggtctcccaaggtgctgggagtacaggcatgagacactgcgcccagccagcagctgctttgatctgtgtggaatcggattttgcagtccctctgcttcgtgggctgtgtcctgctgtgagccctgcctcgcccgatccctctggcctcccatgcgccttccacacctttgtggcccctctctgcacgggtggcgtgtagacccctctgagtgccaccgggaaacgctatctctctctcattcctgtggatggccagtggcctcggcccagtcacgggtgaatgggaaacgcccccaccattgcaagccaaggcccggaaccctgcactcagcctgcggcccgcactacggcctggcttcgctctgaggcgctggcacaaggctcccagactctgtctgtcacccacgcatgccctcgccagccctccctgcctgttttcacacttgggacggggatggggaactggagcctgtggggaagggaagcgggacgggtccggcggccccccgcccacctacgtgtcatccgattcgatggcctccccgcgcgcggcgccaccctggatggactccatggccgtggagtagagcgccttctggcccacaggccgcttctcatctgaggtgctctgggcgccctgcgcctgccgctcgcgctcgtgctggtcgatgttgtgcacgcccagcagcaggctgtagtccatgatcttgaaactttccaggacctggcgggatcgggcaggaacacgccacgccgtcagccgtctctatcccccacaacggctcccggaccctatggggttcccagcacggatggccccgtgggctcgggtgtgagagatggagtcccacggccaggcaggagtgggggttctagtgttatcctgaggaacagaggggctgcggtcacacagcggcatcagagcaggccagagaatgggggcttccagcctcacagcaggctgccccgggcactgagacagggacttcccttcctggctttactccttcctgagagacagggagccgggcctatgctctgaccagcccaggcccatgggcaaggacgtgcccggcctgacaggtgacacccaggtgggtggatgcccagggtagcctcaaggcccctgagtggtctgggcggttttctgggggtatgggtcaagttctcaaaggggtcggggagctggggatggtcagcagcggggcctgggtggagttggggagctgggaggtcccaggctctgctcctgacaggctggggcctcccctccttggctccatgcctcgaagctgccggggtgggacggggacgacggagctaacccaggcagaggaagagccgtgcatatcattctttcgctaacacggagccaacgcaggctccacggggacaggagccagaccctcactggacgcacatgggccctcactgtggcctgcagagcaagcagtcatcccatttgatgggtgaggaaactgaggcacagcaagctctcatggctggctgggagctctgggcttgtgaccacagcatctgaaggctgggctcttctctggggggtggggggactctaccactgtcatcgtgtaacctccagaggaaccacttctcagcagtgcagacactcccgacccccaagggctgggtctggggacatgttataagtgttttgttttctttgtgagatggggtctcacaatgttgcccctgctggtcttgaaaccctgggctcaagccatctgcctgcctcccaaagagctgggatcccaggcgtgagccactgtgtccggccacattttaggttaaggccataaaagcttgagcgcttctggatcccacactggggtggggcctgctgtaggctgcagggcaggtgggcctcggcctggcaccctccctggccctgcctgcccaggccgagccctcaccacgcagtcccacctgccaccctccctccccggccggggccgagccctcaccaggcagtcccgctgcagcgtcttgaccagggcgctgaaggtgtcggcgtccagcaggagcccctcgggcatgtcctgcatgaagtccaggtccttgtaggtggggaagctcttctccttctccttcttgctggcgcgccgcttgtaggtggagcccttgaggtcgaacttgaggtgcatcttgaccacgcggggcaggatgttgttcatgaccacgacgcggatgttcttgccccccgactgcacgcagtacagcccatagaacttgggcagcagcgtccgcgggttctggttgaggttctgccgggggaagagggcaagtcgtggagggcggctgggccacagactcacgggggcgggcaaagcaggcctctgcctcagggggctcatggatgcccctggccagcccccctctctccccagaagccctcggggaccccgttcctatgcaggcacccagctggccttcccacggcaccctgactctcatgggccacaactgtgagctccaggagggtctgtttctacagagccaggccccaaggcaggcgcttctgttccagcagaagcttccacactccctgcctgcccacagacatcgccctggctgggctcgcctgttgggaggtctggaggccggaaacgcaatgctgtatcctaaaatacatacatgtatgtatatgcacacacaaacacatacacacacacgcacacacacatgtattttcttgagacagggtctcgctctgtcgcccaggctggagtgcaacggtgcgatcacagctcactgcagcctccacctccagggctcaaaccatcctcccacctcagcctccgaaagtgccaggactccaggcgtgagcccagcctctatgttggttatgctttgcctgtgttgaactgatcaactcagactttcactccaaatctgggtccccaggcgcagtgacgagtctgggtcctgctgtaccctgtagaccccaagcaggcactgggtgactcaggggcacccaagtgaagcaacagcgccccctgcccagagcctctcaatgacgaacccagtgggaagctgcccaggtgtcggggctgagacagacccacagggagaggagtgaggggcgcggactcaggcaccagcctgggcaggctaggtgaactccagcccctgggccgaatccggccaccacctatttttgtagggctgtgagctaagaatggtttttccatttttaaaaagtggaaagggcccagtgcgatggctcatgcctgtaatcctagcactgtgggaggccgaggcgggcggatcacctgaggtcaggagtttgagaccagcctggccaacatggtgaaaccccgtctctattaaaaataaaaattagctgggagtggtggcgcatgcctgtaatcccagctgcttgggaggctgaggcaggagaatcacttgaacctaggagatggaggttgcagtgagccgagattgtgccattgcattccagcctgggcaacagagccagactccatctcaaaagaaaaaaaaaaaaaaaggccaagcacagtggctcacatctataatcctagcactttgggaggccaaggcaggcagatcatgaagtcaggagaccagcttgaccaacacggtgaaaccccatctctactaaaaatacaaaaattagccaggcgtggtggtaggtgcctggaatcacaactactcaggaggctgaggcagcagaatcgcttgaacccaggaggcggagcttgcagtaagccaagatcacgccaatgcactccagcctgggtgacagagcgagactccatctcaaaaaaaaaaaaaaaaaaaaaaatgaagaggccaggcgcggtggctcacgcctataattccaacactccaggaggccgagacaggcagatcacgacatcaggaaatcgagaccatcctggctaacacggtgaaaccatgtctctactaaaaatataaaaaaatagccaggcgtggtggcgggcgcctgtagtcccagctactcgggaggctgaggcaggagaatggcttgaacccaggagggggaggctgcagtgagccaagatggcaccactgcactccagcctgggtgacagagcgagactccgtctcaaaacataaataaataaataaaaaagtggagaaatagaaaatagtctttgatgacacgtgaaagtgatatggaattcgcatttcttggtccataaataatgcgtatgggcacatggccgcgcccatccattctcatgtggtcacagcagctcgctgccatccaggcagagctcagtcctggagacacagcacactggctcgcagagccaaaaacactctctctgggcctttaaagactgagtttgctgagcctgatctaaggagcccgggcccctcgctaagcatcacagagagtggatggaggaggcctcaagggaaactgagtcacaggctgtgctgtgctgcccagggccgggcagcagcttgggcctggcaacatggaaggcgcccacctcgtctgggcgagtaccggaatcccaggcccaggaacactgtggcagccgccggctcctactcctactcccccctcccggggcctgacgcaccctttctgtgagtcatgcgggatgaggggtgggccggatggagctgcctcacgcctgcctgagcagctggtcttttgtggggtaccatctggtggcccatccccctcctctctggaaccctctgagtcacccttgggccccttgggcctccgtggcagctgacagacgctgcccgcaggctgctggttctggggcccacggctcatagggggtgttggcaaggtggggatggggagccaggcaggggccggtgcccacccagccctgcccggggacggcccccaaggcgtgtggccacaggaggaagagagggcggctcctgaacactggtgctggtgaagcctgacgggggacccccgagggtgagtccccgggacccaagatgcctctcaccacgccccaaggatgcctgcttgcccaagccttgcagacatctgctcccgccagccgggagaagggggttgaccgaggagccatctgccccgcagggcgggccacgcaccatgtagtagccagggagcagcttctgcaggaactcggcctccttgtgcatgacggtcttgatgatgaactcgtcgtcgctggtgacgtagaagagggagccactggcgcccgggttggacagctcgatcagcggctcattgcacagggagtactggaagcagaggaggcgggtcagcgggccccaagctgccggacacacagacagcactggcttccggtctgcccaacagccccaggaactgatgacgggtcgctgcattttacagatgcggaaagagaggctcagagagggcgagagacttgcctgaggctagccagcaaggactggagcctgaggccgagctgactctgcagcccgagggctggtctgctagggcgcactccccaggctgcctgctgctctccttaggagcggacacctgatcgcaccggggtgctgacgcgcgtggctaaaaggtgctcccagcacccctgaagctgggtggggccacaacgccagctctgccccatgagtcataagcagaagctgtcaggtggaactcagggaaggctccacagatgggcgacaggcagctggcatacctgcgtatttgcccttctctccttcccacctatttccctcctgagatgctgatgtgatggctggaacctcagcagccacactggactagaaggtaagctctgggatggaagctgcatctctgatgggcaggccccactctggcccctggcaccccacagtccaagcccttcctccccacttctctgcccctttttctcagcccctgctgtttgtttcatgatgtgctcgctgtctctctgcccccacgccctctcctggacattaggcagaaggtccgtgcaggtggaagtttttttgtgtcactgactcgacaggtgctcgatttgctaaggactagaatgaagatgagacccacgggtgctaccctgcgtcttccgggtatggaaccaatgaagtgtgcatggggctaaggccatctgtgtcacgccctttaaaatcctaactggtcgccattggtgtacacggatgaggtcagagccagctccccatcagcggagcaagccaggccccccagggtcaacgctgggtccgtatctgctggacgacagaagggtggtctccgagtgctgcgtgccgcctccaatgctgctgtgataaacaggtggggggtgtccacgagagtcaggagtggtggcgagcagaagcgaggggaggccaggcacggcggctcacccagcactctgtaatcccaacaccttgggaggctgaggaggatcatttgagcccaggagttcaagaccagcctgggcaacagagcgaggcctcatctgtactaaaaaaaaaaaagaaagaaaacaaaaacaggcatggtgatgcccatctgtggtcccagctacttgggaggctgaggtgggaggatcacttgagcccaggaggtcaaggctgctgtgagctgtgacagcgccactgccctccaacctgggcaacagagcaagagtgtttaaaaaaacaccccaacaagtgaggggaaccacctttggaaaatgctggaagagccaggggcttgaggcgtgagttgggtccccagcgccacacacactctgatctgtgaatatgtttggggaccagaggacgccggaaacatgaggtcacatcaggcccagggcctgggaatgccccagtccctccttgggctcaagtcaccacccccgccctgcactgcccgaggtgctctcgggccagggaacggcgccatcagttatcacacgtcggtcaacacaggctggattttgcggagtcagcaacagccctgccaaccttggcagctcagaacagcgagggtccttcctcctgcatgcgctgcttctgccatggcctggctgggagtgatggtgcagggtgagagagccgtgtggggtggactctgaggctggagggagatctgtccaggccactgctgtcgcccagcccagccatctgcctgcctttttctgcccacagccacgagccacaaatatccacaggaaacacagagcccacgcggctcctccgccttccccgccacggcaggacgccctccagcctcccagacacaggcgcagcagcgcagagcgaaggcgggtctctcctggggctggcgccctccctgggaggccaggggaccccgccaagccctgggccgctgtcctcaggtcacccggagcaggggacaccccaagcagccggagtgtccctccgagacacaaatcactgctgcctgtccacggtggcaggagggggaggccgatctcacctgcagagcggaaaacactgtggaaagggcacgttcggctttgtacaaagaacaccgatgacagggaaattctgaagccacatgactaatggcagttgcagggctatggcctccatgggcctcagctgctacggggaagcaggccccatgcgtggatttctgagccaggcagtgccaggacaaccccccacagcctccttcgtcggtgctggggctctcggcagctgcgccgctgaccttggcctcctctccaccctctgctgaccactgggcagggctgagccccaccctgcatcccacctccgccttctccttcctggctgtcctgagctgtgggccttcctggagctaccccccttaccaggggggactgtgacctcagctgtccaatcagagaagcaccggcaacctcgagtcccctccgaaccctacctgtccccactcaagctcaggggccctgtggacagcaacacgcacactagcccgtcctcccgctgtggcacacggccacactcacaccacagcctggacagaggctagggggctgccgcctgctcagcaccggaggcccccaagagaattctcacactcctgagatgagcagaaggattcgggggtcaccaacaccgggctggctccccagatgctgtgggtgcacacctggcctaaggccctggaatgcgatcttatcgggttctaggtgagacccagatggccccagatcggcttttatccgtccactcctgctaatggacacgggtgctgtctctctgctacgagccaggctgctgccttctgttcctggccgcctcacacggtagcgtccaggtcacccgagggccatttctaggcaaaaaccccagctgtgttttcactccccactgccctgccaagctcaggcaaacgctgggacactgaagtccggaggctgggccttggcgacacgacccggagcatggtgactcccgggcacctgaacaggctggagttctcggggcgggggaggggggggtgtcacacgtacccctggctggagcacatgctagttctccctggaagagcgcagcctcgggcgcttcctacagactgagataaaccaaacgcacgcacagtcagcaaccaccaaagaaaggcacaaggaaccgaccaccgcgggtgagggcaggatcggagaaccacaggctcccggccccggggaccgtgctgtcgtgacaaccagaacgccaaccgcacttgtctacagagttccagtcttccctgatacaaagttctcgggatgaccaggcaggcttgggaaaaggccacccggagcttttagaagtggtgatggcgcaggttggatgccggggctcacgcctggaatcccagcacttcgggaggctgaggcggtagctcacgcctctaatcccagcactacgggaggctgagacaggcagatcacgaggtcaggagatcgagaccatcctggctgacacggtgaaaccccgtctctactaaaaatacaaaaaattagccgggcgtggtggcaggcacctgtagtcccagctactcgggaagctgaggcaggagaatggcgtgaacccaggaggcggagcttacagtgagccgagatcgcaccactgcactccagcctgggcgacagagcgagactctgtctcgaaaaaaaaaaaagggggtgctggcgctgatgagctccagggccactgtggggagcaccaccctccaaacacctcttttaggagcccggataatgggctgctaggtcaaaggggttggcctagattttgactttgctaacctgaaacaataaagccatggctagagctaggaggtccgactctacgctggtccccagtggcacccacgtcccagtgccttgttctaacccttaagtctgaaaatgggtcagtcactttggcaccaggctgcagaagactataccaactgtttggtgagtggacaccctcgcctgctctgatgacaaggcccacatggtgaggaatggaggctcccagccaacgccagccaggacggagtcctgcagctgccagtgatgtgagcttggaggccgatctctcctgctttcccggtgagtctcacaggagactccggccctgaacctgaccataaccctacacgaggaacccagggaggctgcccccaaatgcctgacccacagaccctccgagaccctgaacatgttctgtttcaagcctggaagcccgtaacagcaaatatgcttaccaagtaatcatctggccggatcccaaagagctcccggaagtagcggaaggcgacaggtgcataggtcttgaagcggaagtcctggaagtggtgggcgggggtgaggttgctgccttcgctgtggaggaaggacgggaggaaacctgtgaggggtggtgggcacctctcccccacccccgccatggtccctcctagtgcctctagcagctgagcctctagcggctcagctccaagacttccttgaaacggcccaatcccacaagcaacagggggctcccgatgggactgtcccccagtaaccaccctctcttctttcattaacaacggggcccacagtgttggccaggcacatggccgccaagaacaggaccatgccgccccagcctcttgcagctaggtgtgctcacgtgactgcactcagccaatgacacgagtggagcagaaacactggtcatgtccgaaagggaagggctgttgttctccttctgttgcctcctgtggctggaatgcagccgtgatggcaggagctttggcagccacctgggaccactggtcacagagctgtatattgaggatggcggtgtggggtgaccagaaggatcccaggaccccaacaccatggaacctcctgaccagccctgcactgcccactggttatttgtagattagaaaagagctaacttctatcttttctttttcctgttcttaaactgcctttacattgggtctctgattcagcagcaaacaaacgtcctgacggacagagggccagagctcaaggccaaggaggcgccaggaggggccaggtgctgctttcagcagagaagggcgctcaggacaggccactccgcctcagagccacgtgtgtgctgggtgagccctgaggctccgggggcccggcccacctggggaagaagatgctctccaccacgtagaagtcctgcatgagcacgtcgcgttcgggcttggagctcaggtggcccacggtgtagccgatgcccagctggatggcacccttcagggtggaggaggtggtctgcagggagaccagagtgtcagggcccccggctgctccccacgctgccctgcaccccctgtgtgcaccggggggtggagatcgtgaccagctgcagcttgggacccggcacctgccaaccccctcctggtggtccccggggctgcctgtcctgcggctgctgagctgtcgacatcaggccgggggatgaagccaccctccctcgggccacacagccaggacagggctcggctgcaactgccgcaccacgtcactcagccctcccagtcctgttggctagctaggttctaaaggttctcccattttgaaacagctccaacttagcaaaagggtcgattcactgtcaagagtttgtttttagggggtaccatttacagcgagatgcccagatcactttcacatctgcagacgcaggttcccgttagctgctttctatgtaacgcacgtggtcacactgggcaacccacatggccgctatgtgcctcagtttccctgcctgtagacagggatgggcacaatggttctggccctcttgcggacgtggtgtcagctgctgttattatttttatttgtttattttttgagacagagtcttgctctgtcgcccaggctggagtgcagtggcgcaatctcagctcactgcaacctccacctcccaggttcaagtgattctcctgcctcagcttcctgagtagctgggattataggtgcgcgccgtcacgcctggctaatttttgtatttttagtagagacggggtttcaccatgttggccaggctggtctcgaactcctgacctcagctaatccacctgcctgggcctcccaaaatgctgcgattgcacgtgtgagccagcacgccggccccgttattattttttgagacagagtcttgctctactgcccaggctggaatgcagtggtgcgatcttggatcactgcaacctccgcctcctgggttcaagctattctcccgcctcagcctcccaagagctgggattacaggcacgcaccagcacacccggctaattatttttttgtatttttagtacagacaaggttgcgccatgttgcccaggctggtctccaactcctgacctctggtgatcctcccgcctcggcctcccaaagtgctaggattccaggagtgagcctccgcgcccggccggctgctgttatttttgccattggcatcgtttgcattattctcactgtgtgctctcgcgccatgttcactttagccctgggaagccggctcatacctccgctctctaattccggtctccagtgctcctgtcgcaggtgcgaggtggcagggagggaggtcgggagttgggagttggtttctgccactgcccagtttcggcctgtctccctcctaagccacactctgggtggtggggggtctggcctgtatgttcacctccccgagatgccacggacagaacagacatgtgcccaaagataacatacaaacggccctgaagcccgcaaagacgctccatgccactgggcaccaagggaaagcacatcaaaccacaggggggccacgcacctggaatcccggccagtcgggaggccggggtgggaggatcccctgagcctgggagttcaagaccagcctgggcaacatggtgaaacccctgtctctaccaaaacaaacaaaaagacacctcgaagagacaccacctcacacccatgaggacgccagaatcagagacaacaatcacgagtgctggtgaggacacggggacgctgggcctcattcactgttgctgggtgtgaaaacggtaccgctgctatggagaacagtttgcgagtttctcaaaagatgacaccgagttacacgtgacttggcaattccactcctgggtgtctgcccgagacaaacgaacacatgtatccacacagactcacacacacgtgtcctcagcagcacaattcacaatggccaggagtgtgaagcacccgagcgtccatgacgcagcaaaggacaagtgcagcacgggcgccccacgcaccagaacacgactcagccatgaacaggagcaaggctctgacacgggccccagtgcgaatgaaccctgaggacgctacactcagtgagagacgccagacacagaaagccacacagtgtgtgattccacttctatgacacgtccaggacaggctgatccacagacgcaggaaagggatgtgggtgccagggctgggagtcgggatgggggtgactgctaacagggacagagttgctatttgagctgatgcaatgttctggaattagaggtgacggctgcacaactctgcatatgtactaaaagtcatttactgcacactttaaaggctgaattgtacagtatatgaatcacatctcagtaaaacggttacttttgaaaaaacaggccctaggtgggggtgggaacagagtgggggtcaggcttcctaccaacacggtgtgagccaggccagcctcagagtgtcccatccactgcccgaggtggtggtggggtccataacccctctccctcaccagggccgagagcccaggctctgcccgaggtttcagggactcagagccgggcaggcgttgcagccaggctgagccacagaacatgctgcccggccgcccggcaaggacagcaaacagtggggcctcatgcaggactgaggactccagcctctgcctccacacagcccacacctgtccctgggcagaccctggtttgtgtcgggggcgataggccccatccatgctaccagtgggatccccctcccctctgctctgtcccgctccctccagccagctaaggggagccgaggaaccttcttgtaggtggtttcgccggatgcgtccacacctcgatggcccaacttcttcccatggccagggcccggctgtgccgtcatggacagaacctgggaagaggaagcaggaagcgttaactccctaaggagcacgcccaccgggacagggcacgctctgaaaccctgggaagaaaggtttagtcgttgggcccagcaggggtgcacagggcagggggcaggtccaggcgactccggggtgcagcaggaggcccctcacccgtgggcgcctggcgggctggctggggcccctcagtgtcccacactggacacccagaagcgctcactccaaggtggagacctctgcctcctcaggaagggcaagaggattgggcagctccagccctctaattccagggtctcccccaggtgctgtggacactggggctggaccgttctttggggtggggccaccctgggcacagcagggtgctgagcagcattcctggcctccacccactccatgccaggagcacctcccagttgtggcaaccacagatgtccccacacaactctgcaaatgtactaaaagtcactcactgcacacttcagagagtacagtatgcaaatcacatctcagtaaagtgggtattttttaaaaaaacaggactgaggtgggggtgggaacagagcgggggtcaggcttcctgccaacacggtgtgagccaggccagcctcagagcatctcacccaccgcctgaggtggtggtgggagtcgtaactcctctccctcaccagggcccctaactgtgagaccgctgggatggaaggattgaaaagaccaccttgtccctgagggagatggtctcactggccagggtcaggcccggctcctgcaagctgtcgggcagcgcgggtgtcccagcagatgggaccgccgaccccagggggcctcagcttgttgccctcgagggaggatgtgaggaggggccttgggagcctgaagggacacagaggccaaccaaggagaacagccccgcctggcaccgtcatttaaggagcgccactgcgtttgctaggagaccccatggaccctccactggccagaccccatcccaccgctatcagccccagggacacgcctgcagccctgacccctgcccctgccctccctccacagccgacgctgctcagccatgttccctgcattctcccaggtggccgccagggggcaggctctccccaggaattcaccccgccacccgggccaccctccacccgcgccaccctccacactgcccccacgccgggggactctgaggaaggatcccagggtcccaggcctggtggacaaagccctccaagctctggctacggacgcagggccaagggtggcccaggtgggacaggtgccttggggactgctcctgtgaatggggctcatggacaggtgccctgaggactgcatgcgggaagacgggagatgcagcagctcgggtgccctcagaggacggcccaccccactgcgcccactggggctgggaagaaggccactcggcgccacggggctggcagaagctgcaaaggcagggccaacgtgcagagaaagctctcgggaggagacgggcagcaatgacaggacccatgtacatgcagatgtgcacacacacagacaaatatgcacacaggcaaacacacgtgcagacgtgcacacaggcaaacgtgtacatacgcacgcaggcaaacaggcacacaggcaaacacacatgcactcaggcaaacatgaacacaggcaaacacgtgcacacacgcacgtaggcaaatgaacacaggcaaacacgtgcacacatgcacgcaaacatgcacacacacaaacgtgcacacacacaggcaaacatccacacaagcaaaaatagatgcacacacgcacgcaggcaaacatgcacacacacaaacgtgcacacacgcacgcaggcaaacatgcacacacacaaacgtgcacacacgcacgcaggcaaacatgcacacataggctgcacacagcctcactgtgcactacgcctgtgtggctcacagacactgagggcgtgggtgcagctggtagcctcgggcatcgccctctgggcagcgtctaaccctccagccaggtcttccattcctgcccccagtcccccggcgagagctgctctctccccaccgcccaccccccagaatccaggctccacgtggcctggaacccagagaagcccttcctgcccctgcagccctgaccaggcacccctgccactgagggtgtggcccctcagatgcagggccccctcctccatcacggaatttcaccccgacctctcaagacgcagttggtgtagacctcacgttcatcctgcttgtggacactggacggcatttggggcccagagaggtgtagtgagctgccccaggccacacagcttctccgcgagtagggaggcagcaggtcagggtggggaccccaggcccttcgtccgctccagacactcacctctgttggggccgccttcttctgagccaaacctgcagaagagacaagctgggtatcagacaggaaaccggtgacctctgggagtcctgggcccagcccccggcccaccttctggcgccccaggcctggcgtgtgtaactccgcgtggggctggtctcaaggctacacacaagtgaagacatggactgagtgcgctgggaggatgtgatgagggtgggggccactggggcctgccatggtcaccctggttggcagccactggggcctagagcaggggagaggctttgcagcctcagggagatgggcagctggtgacgcctaggcttggcacccaccacggagggcctggggcttggacctgcctggaggaggggaggggaaatagggagcaaacctcccccggctctgacccccttcacacccagacatgaggttctgggcagtcaacaactgagcaggtctgaactgaccaagccccgcttcctcggaggcaggcgccaggagaggctcgggcatggggaaatcaggtgccagcgtggggagtgagggggggcaggcccccgctggggcgagggcaggctggagttgcagggagcgcccagcacctgggcagctgcggtcagtgggaactggccaggggtccccagggctgccgccctccctgcccctctccagagtgaggtttgtggaagggtaagagaggctgcgaggggacccccagccctgccctggctcctgggcccgcagcctccggtcagcgcagcagggcctgggccgcagctccagagaggacaacagaggcctgcaggattgagccaacgagcccaggcctgggctgagccgggagcaccttcctccatgcaaggaggctgggacgaggggagcaggcgagactcagctcctaggacccaggaccacatccccagccctggctcccagcagcagggccctggggtcctcatctggagaacgggaacagactctacagctgtgattacaggccctgagaccgacgggagatgatcctgggggacctgggagcccgatgtcctcacagggtcctcacgagcgggggcgagagggtgagtcagacagagactggaagaggctgcgctgtggctgtgaagagggaggaagggacctgagccgacagatgcgggcgcctctagatgctgggaaaagggggaaacggattctcctctgcagcttgtgctgggcccagccctgcccacagcttgactttagcctggtgaggccccgttctggggctggactcctggcctcggagccctgaggtgggaagcgatgtcagcgactgcagggatcgcacgtgctggcgtccaccatgcaggcctggggaagacctggtctcgccctcaaggggctcacggtcaacaggggtgggcgcagggctgggtgtttgatgtggggtgacaggcggggtgcggatcagcaagggggggcttccctgggctggtcctgtctgagctcagtgccgaacaaggatgccgtgggagccggagggagttccaggcggagggaacggcagcacaaaggtcacaaggtggctgaggcagccacgctgcacggataacagcagcgtcctccaggctcatgcagaggcgggtaccgaaggggagtgcctccctgttggattccgatgctggcaccacccagggcccaggggcatggagacaaatgcttcttttcaatcacaggggctgtgggtcagggctgactccaccccagctctgccagcatcttctcactccattcccccttcctagaggaagaggctgagggttggggaagggagggctggctgaggtctggcagctgggggtgctggggcaggccctcaaaggggattattatgagcccgtggagacactcaggctgcgccggagtgtgtgcaggagggtgcggcaggtgccctgctccgtagggctcggccctctggctgcctccctgctctgggctgggcagcagtgcgttggaactggtctggccctggcttccaggccggctgaggtgagcaggggaggccaggacatgtgaggggccaactgggcgaggttcagggaggtgcagacaggtgaggaggtgggtgcggagtccgcggtgcagacgggggccgtcaggggtggggacccggctgggtgtggactcgggagaggggacagaggagaatttccccgagagacaaaaagtctttctggaccaaggccttacaaagccagcaaagagtgcagagaaggcgggagcccttctgttttatgacgcggaaagagatgctcagagggaggggtgaacccacccgaggtcacacagaaggagaaggaaagtcaaacctgggcctgggtcggcgatgccccaccctatcagccctgccagcgcccctcggcccccatgggcactgtgctgctctcggtgggtgcacgggagacccacgtgtgtcccatccagaggctgcaccccggtgaccgccctgccgtctgaaaacacgtccaccgcgggcactgaaggcaactgaatgcgacttggtggagcagcccatagctttgctctgctgccgggtcagaactgccggagacaagacgaaggcacgaggtggaaaactttgctggggtcaggagcctcggggcaggggcaggccggggaggggcctggggtcaggagcctcggggcaggcagcaggtatggagggggctggggccagaagcctctgcaggcggcaggtggggaggggactgcggtcaggaacctggggcaggcggcaggtggggagggggctggggtcaggagcctctgcaggcggcaggtggggagggggccgcattcgagacgctggtgggcccctgcagtcgtggtcagtccccacgcctgcctgagggtgcggggttggacggtgtccctccgacattcacgtccttccaagaacctcagcctgcaaccgtatttggaaagagagtctttgctgatgtcattgggtaagatgaggtcatgccggagtggggtgggccctggatccaccgctgtccttataagagaagccgctcagggaggccaagatgccgtgtggggtggaggcggggagggcaccactcctccaggccctgaaacgccaaggatgcccggaggcaccaggagcagaggggtgtggagcttctccgaggtcggtcgggagggcagagccctgcccactcctggacctcaggctcctggcctccagagctgagccagaacaaacgcctgttcaaggcctgctgctccaagccccccagtcccggggactttgtctgggcagcccaggacctcacacggagccctccagtgaggaccccagccctgggtgggagggggcgtacttctcaaggcagcaagaacagctgaagggtcctcccctcgggccacctggatgccctgcagggctgggtgggcagcgggtgggccctggagggatctgggggacagacccatggtgctcactgcaggggcggggacggggacggagggagtggggtgactcaggattccggctgccacggtgaagggaaagacgggctgcttctctgtccttccagaggacagggccagtcgcccccaggtctctgacaggccacaaagggcctgctctgggccgcggcggggcggaaggtgctggacgctgacgtgatgtttgggttggcggcccgggagcagaacaattcacggttttacgtccagggtgtgggggaaggaaaagaagagagggcaggaagccagcggtgggccggggcgggacgttccagacctcatcgggggcccgggcgtccccctgctcggcctgtctggggcctccctgcccacagtcctgactctactcgcgaaaccacccctctggggcccccccacacccacttgggtgactcagctgttttcctcagtggccccgatgctgagaggtcacagcgcttgggtccacccctgcccggactctcccaggctccctacggccccgggacccagtggatgcagtgaggccctccagacccagctctgctgacctcaccaggcacctcggggtcacccgtgttgggtgtaggccccctgcctcagtttccctctgtggttccacgtcttcacctgcccgactcacctgagctggctaacggggagaggagaggagaggggcaggcggctcgggccctgctgggaacgtccctgcactgggggcctgtagggttaagggactggccggggccgaagcactgaggtggaggtggagcaggacggagaggggaggcactcggttgggggaccccagggaaaatgtggggctcccagggcaggcaggaacgggcagcaaggggagaccagagccgagtgtcctgtggaggagaggggacggggagaaagcacagccttgctgccaccgcctgcccagggggtgggggcaggtgagcgccatcttcactcaatcctcgctccccatgaggcccgctcagggcacagagcctgccgtgacccccatagggggctgtcatgacggtgagctctgctcagcctgagacgtgactaattatctgctgaatgagccaccccgttttcgaggaaattaggttttaaaaatagtcgggggaggaaaggcgagccgcgctgcggagccgggaggtggcccctctgagcagtttccgctggccaggcccgaggcgggggctctgccgctggggcccctctctcctggccccatcacaggacgtggtggcgacccgggcctgcggtgcacggctctgatcgctggctgcacggtgacctcatcggccaccccacctccctgtgtgcccagggcttctctctgagcctcagtctctctctataaagtgcggctgaagccagctcgagccctagaggcactgccattctccacggggccacatggccgcctctgcacccagctgttccctggcctgcgcctggtctccgccctggccctgccagtgctccctggacactgtgtcccacaccagccacctttgccaccccactgacaccgccccatcctgcagaccagcctggtccctcctgctgagcctgggggctccctcaggacggggcctgccctgggctgacagcatgggcgtgtttgttgactgacccatggactgacagatacccgttcctcttttctctgcacaacaggcctccgccagagcttcctctccacatctgtctgacatggacactgaggcagggaatgactaaactgggggaggaggcagattgtcaggctggctctgcagtgagacccaaagtaagaatggggacggagaggtctggacaggtggccagagggagggaggcatcacagtgagaggaaacagggcacattctgggctcaccgacagggcgccgtggggcagagggcccagcgaggcaagctcgagggtgggtggaaggtgcctcagcccctgtgggcacctgcagggcactgtgacagcaggcaggacaggaacagtggtggcctcatccctgtagaaccaaggtccagacccccatggctgggaggagaaagccccagccctggaggcggtgggggcggggggagagtgggcagggccctggaaggcccaggatgatgaagctggggactggggggctggggactggggggccggggagagcccacggcaggggagggattctgcgaaagggggcccacccaccccgcccccaccgcagacaagggtctccccaggcctcactgcaaccctgcagggtgaagaccaggccctgtcaccccaccagaccctgtgtggccccctccctgccctctgctcctccctctgctccagccacacgggccctcgctgtccctccagcacgccagcgccaccctgtgtcatggcctttgcacgagcggtgcctctgcctggcctgccagtcccaagattccctcacggtttgttcctgtttcaccccagacctggcttgaacatcacccctcagaggcctcctccagccaacctgcaccaaacgatcccctcctcactgcccggcacacggcaccacctgatacatggctgttgtcatccccacaacaggggtcccaggcctgctctgtcacctgctcacagactctggcaaagctctgagggcagcaagggaaggccagtgagaaaggggcggcagtgggacccaggtgtgtcagagtagcacagggggcctgcacccctgggtggggccgctgcccagagggcaactgctgggcaccccaggacaggtgcaggctcgccgtgacacagcaacccgggtgtgtgaggacggcccaggcacggggtcctgcgatcccacaagcaggaagcaaccccgggccagagctcacggtcacctccctcattcgctggaacaacccatcctctggcctcccgccgtgcaggcctccgaccatggggaccacaggcccctctgaggacctgccaggacggccaggctgggcagcggcactccacgacacaggctggggtggggacccggaggcggcagggccgaccctcagctctggtgaggctcagaccaggacccggcggacaagggtaggccgtgcaagaatcttctcctgctaaactgcagaaaggccttctgtggctgtccacagatggctgcgacgcttggcagtagtgtgacttgctctgaccaacagaatgtgatgcaagggatggtgtgggcgtgaggaaggctggcacttctcactgtgcctctgggaacctgggccacgacactcagaggccagctccctgcaaaaagaccgggcggccccagctgttcctgccatcctggctgagggttggacaggcaagtgtaggacgagcttgaatttcctgccactgccgaccacagccatggaactaaccccaggtatgacctacagaagaaccacccaactgaacccaacccaaataacagaatcgcaagcaaatacacagttgtttgaagcttctgtctgggggtggtttgttatacaatagctgactgaaacagatctcggctcactacaacctctgcctcttgggtttaagtgattctcctgtctcagcctcccccgagtagctgcagatcttggctcactacagcctccgccactcgggttcaagcgattctcctgcctcagcctcccccgagtagctgcagatctcggctcactacagcctccgcctcccgggttcaagcgattctcctgcctcagcctcccccgagtagctgcagatctcggctcactacagcctccgcctcccgggttcaagcgattctcctgcctcagcctcccccgagtagctgggactacaggcacgcaccaccatgcccagcttttttgtatttttagtagagatggggtttcaccgtgttacccaggatggtctcaatctcttgacctcgtgatctgcccgccttggcctcccagcgtgctgcgatgacagacatgagccaccgtgcccggcctatctgtggacttctttggaacaggaggagttacagtttttaattcctttgtcttacttggacttcttacattcaaagaagcattaataatctgtacatggattattcagccatgaaaaggagtgaggctctgacgcaggccacagcacggatgcaccttgaagacgtcacactcagtgagagataccagacacaagaggccatgcagtgtgtgaccccatttctatgaaatgtccaggacaggctgatccagagagacagggaggggatgcatgggtgctggggctggggagggatggagagtgacagccgccaggcgcagggtttgctttcggggtgatggaaatgtactagaattagtggcagtgactgaacaactctgtgaatacgccgagaagaatttactcagttgcaataagtaagcagtaagacactttcaaagagtgaattttgtgtcccagaaaagcaaaatgaagatgcagatccctttagttgcaaaagcattgcccagtgacatacaccatctggaaccttctccaaactcggtcatcccccagggcctcagtttgcttgtctctaaaggaggttgggggacttggtcaaggcttgaccagaagggcagccagtctgctgcaggctggagcttctcacactgtctgtgctgtagaactgagttcaacctttcttttctctccatcatggaccaaggcttttgtgaaacgcagtaaacagcaactaccgaggtctgaaaggctggtgccgaccctcagcttctgctcctctctggtatggaccgggatggacagtctcgtccatggtgacatcaaacggccctgcctcaggcctcttctctcttgatatgagtgtacccacatgcaaacggcttgggggcctccaggcaccccccaaagcccatgcaaaccaggatctcccccctcagcacttagggctggattgttctctgggctggtcactggggccgtcctgggcactgcagggtgccgagcagcatccctggcctccacccactccatgccaggggcaccccccagctgtaacaaccacagatgtctccagacatggccccgtgtccccaggggggcaggatgaccccaggtgatgccccgcttcagtagcccctgaggttaaacccttgggtgagatgttcaacacggctgcaacagcaaatatctgcaccaggtgccgaccaagctctccccacacaggatcccacccagcctgaccaggcagccactcctcacggcttcatttgacacatggggaaaccgaggctgggagaggtggaaggattctgacaccgctggggagaacccatgtggccaggcctcccgcgtgaccgtctctaacccatacaggcctggcatggtaggcaatggggtccctgtttggggacaggcagcacccgactgatggtccccaccgggaagtgatgagagatgtgaactcaggtacctgcccggccctgcagccccaagcccagcgagtcgccgtaaactgtcacccggtacatccgcggtccccggcacccaccactcccagcacaccctggtgagtggcccgcccgggcttggttctgagccctgcggtgtttgggttcggtcaactctagaaatcacaatgttttggagaaaaacctgggtttctcgaaaaacaggcagatctagaaataaaaggctgcaccatcactcggccccccgcctggcacactcgcctctgccttcgccccccacggcccactccccgacggcgcgtggccaggaggcgcctgtgagcacctgatccagctgccacctaattcatgatcaccgtttgacaggccgggaaatggggatttggggaaatttaggaagttacccaaagtcaacggtgaaaaacgctgtgatcccatctccgaatccagaaaaaccttcaacgaaattcaacatgaatttcacgtccccccaaaatactaccaagaaagaaaaaaaggagagaaagggagactgcttttactttaaaaagaaatataagaccaggcgaggtggctctagcactttgggaggctgaggcaggaggacggcttgagcccagaagtttgagacttgcctgggcaacatcgtgagacccccatctctacaaaaaaatttaaatattagccaggagtggtggtgcacacctgtatttctagctacttgggaggctgaggcgggaggatcacttgaacccagaagtttgaggctgcagtgagctatgactgcaccactgcactctagcctgggcaacagagcaagatcctgtcttaaaattaaaataaaataaaataaaatataaaatgaaagaagtataaagcaaaaagttatgggaaatgccttaatgtcaaccacaagaccaggggtgtggctgtgagagccgccactgcagcggaagtgctggctggagcaataagactagaaaaagagaaaggaatgaagactgaaaagaaaaagagaaagttttaggccaggctttacggtggctcacgcctgtcatcccagcactttgggaggccgaggcaggcgggtcacttgagcccaggagttagagaccagcctggccaacatggtgaaaccccgtctctactgaaaatacaaaaattaggcgggtgtggtggccagtgcctgtaatcccagctacttgggaggcggaggcaggagaatcgcttaaacctgggaggcggaggttgcagtgagccaagatcatgccactgcactccagcctgggcaacagagtgagactccctctcaaaaaaaaagagacagtgagtccagttcaagatgctgaatcgtgttaagtgttgacaggtgggggtgctgaggtctgcaactttgaaaggcttccaaaaaacaagctgagagggatggcggaatggagggatggtgggatggagggatggaaggatggtgggatggagggagggatggaggatggaggatggagggatggagggagggatgcagggagggagggagggatagatggagggatggagggagggagggatggaggggtgggagagggatagagagagggagggagggaggggagggagggagggatggaggagggatggagggataaagggagggatggagaatggagggatggagggagggatggatggatggaggatggaggaatagagggaaggaggatggagggatggacagatggagggatggagagacggagggatggagaatggagggatggagaatggagggatggagagatggaaggagaatggaggatggaggagggagggagaatggagggatggagagatggagggatggagagatggcaggatagaaaatggagggatggagagatggagggatggaggatggagaatggaggatgaagggatggagagatggagggacggagggatggaggatggaggaatggagaatggaggggtggaggaatggagaatggaggggtggagggatggagggatggagggacggagggatggagggacggagggatgcagggacagaggcatggagggatggaggaatggaggatggagggatggagaatagatggatggagggatagagatggagtgatgaaggatggagggatggaggatggagagatggaggatggagggatggaggatggagggatggaggagggatggaggcaaggaggatggaaggatggtgggatggagggagggatggatggagggagggatggagagatggaaggagggatggagggagggatggagggataaagggatggagggatggaggggtggaaggagggatggagagatggaaggatggagggagagatggagagatggcgagatggagggatggcgagatggagggatggcgagatggagggcgggagggatggagggatggcgggatggcaggatggagggagggacagagggatggcgggatggcaggacggagggagggatggagggagggatggagaatggagggatggaggatgaagggatggcaagatggatggagggagggatggagggatggcgggatggcaggatggagggagggatggcgggatggcaggacggaggaagggatggagggatggaggagtggagggagggatggagaatggagggatggaggatgaagggatggcaagatggagggagggatggagggatggtgggatggagggatggcgtgaacacagccaactgccaattgcaagacccaggcggtaagtcgtgggtctactgcccaattctttcaacttttcagcacttttgaaaattctctttaaaaatccctttcccccaggggaaaggtgagtctttaccttggacacaggtgttttcaagctctgaagaaacacggtttttgagggaactctgcttgaggaacctgagtggggacacgggtcacagaggatgcccccaagctccagtgggccgggccctgtgcccaggctccccacccagcaccacacctttgaggggcatgttcctgcctcaggggccttgcgcgtgctgcgcctgtgtccctgcttggccggctcctgtcctcccgtttgggtctcagcctctcacctccccagggagaccgtcctcacagccaccttcctacccgccttgcatcccattctatttcctcacactgcacatcagttgggactgatcttgctccttcctgtgggagcacagacctggcgtctcgttcacggttgctctcccagacctactcgctactcagtaggggcgcagcagcaccggtgaatggagctggggcaggcgggctgggctggatctgggagatccagaggggtcctcagctgtggagggggagcactggagaggacgtgacctgggacctgggctcaggcacacagtgagttggctaccaagatggggcatcaggaagaagcacaggcttgggtcagatgtgctgagcagtcaggacctgcagggttggaggggcccaaggggcgccctggatgtggcttgacgtgctgcgctgggcacgcatggtggacggagtggtggagcaggcaactggagcctagaacgtgcccggcatgttgcagacgctcaagaaactttctgcagcaaacgaagaggcagatgctgtgggagacactgcccgggctatggtggggtttgggggatcccagctcctgccctctggccctgtgagaacaccctggctacagccccctcggggggacgtggcaaaggcctgaagccccacaatcaagcctggaacaatggccctgaagtgactacaggctagttcttaccctgaagatgcactctcttctgattctgagactcccagcgtggtgaatggtgtcaggtgattgtctgttggctcgttcatccgttcatccatccatccatccatccatccaaaccaaaatcagcaagcatctcttgggtttgggggatgacacaccactgaggcggccggctctctgtctaaatgcaactgtcttttcttttttcttttgagacggagtcctgctctgtcgcccaggctggagtgcaacggcaccatcctgactcactgcaacctccgcctcccaggttcatacgattctcccgtctcagcctcccgagtagctgggattaaagggatccgccactattctcagctaatttttctatttttatagagatggcgtttcaccatgttggccaggctggtctcgctcctgacctcaggtgatccactcactttggcctcccaaagtgctgggatgacaggcgtgagccaccgcgcccggactgtctaaatacaatgtctaataagaaaaggttttaagcacctggaaagcacagaatcacataaaagacacccatctattactacataggtcaaaaaacatcttttctgtttatcccttaagtcaggggtcagcaaacttttgtaaagggtcagaggagatcaggcggaggccaggatctcctctgggacaggctttgagcgtggccctgggggtggagggagtgaccgaaatggaggtctcaccaggggagactctgccctccagggcacactggttgatgtctggggccatttgtgattgtcatgactaagggtgctcctggcataaagtaggcggaggccagcgacactgctcagccccctgcagtgcccaggatggccctaccccagagaaagatcaggtcccacaggtcggcagtgctgagaggcagagaccctgttttagagactgggatggtagaatctcgcccctgttcgccccccgcatctgcacacacaagaacccggagtcaacacagtatggaggtatgtgggatgggagtgggggcgggcagggtgttcctgacactattctccgggtgtgtacaatgtttcaggaaaagaacacccgtacctgtaccaccctgtccacttttttttttttttttgagatagagtctcgttctgtcgcccaggctggagtgcagtggcatgattttggctcactgcaacctctgcctcctgggttcaagcgattctcctgcctcagtctcccaagtagctgggattacaggcgttcaccactaccacctggctaatttttgtatttctagtagcgacggaattttgccatgttggccaggctgatctcgaactcctgacctcaggtgatccacccacctcggcctcccaaagtgctgggattacaggcatgagccaccgcgcctggcccacttttgtcttttgtttgaagttccctgtaataaaagctgcagctcgtacacacatccccccgcgggctggtgctctgcaagctgcgtctctgaccctctcaatgctccatgaggtgactggcattggacctattttacagctatgtaaactgaggctcagaggtctctgctagtcaaaggcagcaacattcgctccagcctggacttgaagggcaaacggcagccccagggcagcccctgggggagggcaaacagcagccccagggcagcccctgggggaggagcaaacttaaggcacattcttcagataaactccagggggtcacttagccaaacgagccctggggcctgcgtttggtcctctggcccctcaggcccaccaggatccaaagcgaactccttccccgtcagcctggcgtgtaggaatatgcttccacgagcccagattgcagagcctgctgcacgctgcatgctggtctgaccccgtcaccacccccaccaatagcacagagggagacaaagagaaggtgcctaacatttcttagaaaaggcatcgtgggccaggcacagtggctcactcttataaacccagcactttgggaggctgaggcgggtggatcacctgagatcaggagtttgagaccagtctggccaacatggtgaggccccgtctctactaaaaatacaaacattagccaggcatgggggtgcgcgcctgtaatcccggctactcaggaggctgaggcaggagaatcgctcaaacccaggaggcagaggttgcagtgagctgagatcgcaccactgcattccagcctggacaacagagcaagactccatctaaaaaaaaaaaaaaaaaggcattgtgggccaggcgcagttctcatacctgtcatcccagcacacttggaggccgaggtgggaggattgcttgagcccaggaattccagaccagaccgagcaacatagcaagacatagcaagaccccacctcttcaaaaaacaaaaaaattatctggcgtggtgacgtgtgcctgtagtcccggctactcgggaggctgcggtgggaagactgcttgagccccagagttggaggctgcagtgagctatgatggtgacactccatttcagcctgggtgacagagcaagactgtccctataaaaaaattaaaaaaataaaaaataaagagcagaagctctcttggaagcggctcctccagccccagttgagccttcagaggaggcagtcccggctgacagcttcaccacagcctcatgagagaccccgagccaggaccacccagctacgccgctcccagactcctgactcagaaactgtgtgaggtcacagatgttgcctcaatgaacgtttgctggacagaggcccagatggagaacacctcccctcctccccctcccctcccctcctgtccttcccctccctcctctcctccccctccctccccacaccaggcttggtcctgccctagggcctccgcacaggctgcgcctctgcctggaactctctctcccacccaaccttgttcaggtctagatcaaatgtcacctcctcagagagtcccctccctggtcaccctgcccccgctgggtttacttctctctactccttggatcctccacatttgttccctctgaggccatgagcccggccagggcagcgacttcatctttcccctctgcaacagtgcagacagcacgagcctggcacgtgggtaaggctgcctgcgacagtgtcctcctcccaggagttccacggagatctgggtccagggcacagtgggcttggctcaggagggaaacggggttggatggggtcaagagcccaggggcgcaggctgcttcccgtctctaaccactgagccaccctggaacagctggagcgcaggcaggagctggccagagacgagctagcccaccttcgccgtgtgtgtggcggggcccgcaccatatgagaaccccatggcttagtcacgcaattgtcccaacaaccctgtgacgtaggcactattactgctcccattatgcagaggcggaaactgaggctcagagaggtcagatcgcttgcctgatcatgcagcaaaaatgtaggggtggacgcacctgattccaggatgtcaggccccagtctgcgtcaccacagcagggacgggaggagagtgaggaggagccaggcgggggaagggcagaggggcctcccaggcagaggcacagccagtacggaggccccggggcaggaccgtgtctggagagctgggatcagcccgggcacagcaggaacatcctgtgcagagcacagccagcccccgcttcccctcccgggcagtcccacacctcccccacactggagcccctgcttcccctcccgggcagtcccacaccccccccacgctggagcccccgcttcctctcccgggcagtcccacacctcccccatgttggagcccccaccaccccgaccagtgctgactctgtctctgcagcaggcccggcccccagcacaggagaggcagagcagatgcttcggtgcctggagcagcacccacagcctcctggctgggaagtggcctctgtgtcacccactggacctcaggattcctcaaaataaagacggaacgataagaagagcctcccgctcacagcgctgcagtggtaaccacaccagtcacgcatgagcatttctttgccttataattagaggcatcaagatgagctcattgccgccccctcaccccacacacatcatccagcgcacaatctcacagcactcacacacagatggggacacctgctgcctgccagggtcccttccatcccggggacagggccgaattccttccccttgaaagtgggcgggtctcaagccctgctttggccaatcacatgatgcagaagtgacatggggggaattcttccatcagcctctgctctcttggaatccctccagtacgatgctggggccaggctggagggtggcagcaatgcggagagaggcctgggacaggaggccaccagggtgtgctggcacaagccagatgccgcagcagaaccgacctgctgagcccagccaagcccagccaatactgggaaactgacagcaaaagcactgcagcgtgaagcctctcagtgtggcagtggtttgttgcataatccacgaatcccaccacagacgcacccagagcgggaccaccacctgctgaaggtcacccggcacgtagggcccaggcagcaaagccccgggcggctctctccctctgagcaccaggatctggttccctgtgacccaccaggagaactcaagctcttagtgccacatggcttccaccactgtagacacgtcactcagcagtcagggccagacacgtgaatcttagaaggttccaagttatttctgggtgtgggatgggggagggtctcttaatttgcaacttccatcctttggtgccgtctgaaatacatattttgtcatttttatttatagaaatgaggcttttctcaaagcattaactcactcaacttgtaaaacaggcagaggaaaagaaaacaaacagtgtgaacatctgaaaaagacgcccagacccctctaatgataaaagacatgatatgaaaccagcctgccagcaatgggttggggactcagggggtcctcacacggctgggggtgatgcccgtgtcaatagattctcccctagggggcagcctggcagcatttctaatgtgtgtgcccttggcagcaacttcaattctagaactttctcctagacaacttcggcacaggtaaaaagacaggagtctcgctgattatatggaactcataaggtcctacaaagactgtctaaagcaggggctggtataccacagtccaggggccgaacacagcccactaaagaaagttttattgggccaggcacggtggctcatgcctgtaatcccagcactttgggaggccgaggcgggcggatcacgaggtcaggagatcgagaccatcctggctaacacggtgaaaccccgtctctactaaaaatacaaaaaattagccgggtgtggtggcgggcgcctgtagtcccagctactcgggaggctgaggcaggagaatggcgtgaacccgggaggcggagcttgcagtgagctgagatcatgccactgcactccagcctgggtgacagagcgagactccgtctcaaaaaaaaaaaaaaagttttattggaacatggccacacccatgtgttcacgaattgtctggctccttaagtgctacaaccgcagtgtggaggagttgtgacagagaccatctggaccacaaaccctaaaatgttcatcttgatttttttgtagagacggggtcttgcactgtcacccaggctggaacacagtggtgccaccatagctctgcagcctccaactcctgggctcaagcgaccgtcctgcctcagcctcctgagtagctgggactacaggcgccaccacacctggctaattcttttttcagaaacgggggtctcgcgttgttgccgaggctggtctcaaactcctgggctcaactgatcctcctaccctggcctcccgaagcactgggattacaggcgtgagccaccgtacttagactaaaagctaaaaaatttactactcagccctttacagagtttcctagccaggcacagtgactgacaccggtaatcctagcactttgggaggccgatcctcccaaatacaaatacaaaaattagccgggcgtggtggcgggcgcctgtagtcccagctactcaggaggctgaggcaggagaatggcatgaaccagggaggcagagcttgcagtgagctgagatcacgccactgcactccagcctgggcgacagagtgagactctgtctcaaaaaaataaaaataaaggctgggtgcagtggctcacgtgtgtaatcctagcactctgggaggccaaggcgggcagatcacctgaggtcgggagtttgagaccagtctgaccaacatggagaaaccccgtctctactaaaaatacaaaattagccagacgtgatggcgggcgcctgtaatcccagctactcaggaggctgaggcaggagaatcacttgaacccaggaggtggagcttgtggtgaaccgagatcgcaccattgcactccagcctgggcaacaggagcgaaactccgtctcaaaataaataaataaataaaataaaataaaataaaataaaataaaataattacaaactggaatgaatgtaatagctaaaactataaaactacttaagaaaatggggtaataaatctttgtgaccttggattaggcaacaatttcttaaataaacaccaaaagcataagcaagcaaagaaaaaaacagatcaaggccaggtgcagtggctcacaccggtaatcccagcactttgggaggccgaggcaggtggatagcctaaggtcggcagttcgagagcagcctggccaacatggtaaaaccctgtccctactaaaaacacaaaaattagccgggcatagtggtgcacacctataatcccagctactctggaagctgaagaagaagattggcttgaacccgggaggcagacgttgcagtgggctgagatcatgccactgcactccagcctgggtgaaaagagtgagactccgactcaaaacaaaaacaaaaaaaattagccaggcatggtggcacatgcctgtagtcccagctactcaggaggctgagataggagaattgcttgaacctgggaggcggaggttgcagtgagccgagactgcgccactgcactccagcctgggtggcagactgagactcagtctcaaaaagaaaagaatttaagaaagaagtccaagtgtgcaataaggaatatgtcccaacagggcaggaaaggaagaaaggacccacaggtgcagggagcggtgagggcctgtgggaaggggacacagacgcacatacacgcacacatgcacatacatgcacacatgcacacgcacacacatacatgcacacatgcacacgcacacacatgcacacgcacacacatgcagatacacacatgcatacacgcacacacacgcacaggccctcagaggacaccacagaacacctgcgggacacagcaaggaaggggtgaggtggctggaggggagggtacacctgggggaccccagcacggtggagggacagcctggggtccacccgagtagtaggccgcccctcttccttgccccttctcccttctccctgccgggtgctccccgcagggcatagagtgatcgctttccccgcagcaggtgggcgggcaggagccaggccggtaaacaggaagctctgcgcaggcgggcggagcatccagaactccgcaggccctgaggtgttgggtcgtttcccagggccccaatgtccagggagaaagaggctccactctcagcaccaagctcccgggcgggccggggcaggaggctgtggggcgtggccagcccgcaggtggcggggccgacgggatgggtcagggtgcacagagcacacgccagcccctgggggaagcccggcccgtgcgggctgcgggagatcctgatgggccccgagctgaggctcccgcagccagggtctgcgcgtggtccccacctccttgcgcgctccgtctccagcacagcagaggtggacgcccctcgcggctggctccccagcgtccctgtcctccaggggcgcagcgtccctccggggagtacagtgtccctgaagggaattccttccagagcctgaggttaggccgtggtgggaaacagagcggggtgccgcaggggagcccgcaggagctcctgttcctcacctgcgagggggggacggcctctggccccctgctgtgggcggggagggatctagaagaccggaaggctatttccagggcagcacccccaggactctggggcacacacgtccccaggcagctccggtgaggccaccctcgccccctggtttcaactcctgctgtgagcacctggcctttccctggtccactgagagccgcgtgtgttttttgcggttttgctggtgattctgctgctgaaattgcccccccaggcattgtcctcaggtggtttcgtgtccctcagggctagagacccggatgagccccatggagaaacccgtagtgagagaagctttgctcaaacaggactgagagcggaaagagagagagagagaggagagtggggggagaacgagagcgagagacacaccgagctggtgggccgggggagggggacccacacccacgtcgccatggccccccaccccgtttttgagcccccacacagccgaatacatgcccccggtcccccttccagccttgtccccaacacagcctgcaaatgggcgggggcctgggagagtgcccgggatggggctggggggtggggggggcttggcgcacgcggcctatggtctgtgagctccctgtggataaatcaacaacacgggtgtctttaaaattttcttaggatctcactctgtcgcccaggctggagtgcagtggtgcaatcacggctcactgcagcctcaaactcctgggctcagtaatccagttattctcccacctcagcctcccaaagtgctgggattacaggtgtgagccaccgcacccagccctaaaataacacgccttgaaataaaaacgaacatacaacaaggtcacgtatcgactggctgatggaaacatcatgcccagaggctcacaggaacccgaccttgggtttcccctggagccagggctcagtgtgcgcctgaagtgtctgcagcagcttcacaaaggaactaccacaaacaggcctggcgcagtggctcatgcctgtaaccccagcactttgggaggctgaggtggctggatcacaaggtcaggagttcgagacccacctggccaacatggtgaaaccctgtctctactaaaaatacaaaaattagccgggtgtggtggcgggcgcctgtaatcccagctacttgggaggctgaggcagcagaattgcttgaaaccggaagacagaggtttcggtgagctgagatcgcgccactgcactccagcctggacgagagggcaaaactccgtctcaaaaaaataaaataattaaaataaaataaagaactaccacaaataatggaactggctgcttcaggcagagaggtaccatgccagcaatcaacacgcaaatggcctgacataatcacacacgcacacgctaacacacacacactaactcacatgcactctcacacacacaaacttgcacacactaacgtacactccccccccacacacagaatgataaagacatggcaaaacgttagcagctggtggatctctgtgcgggctgtacaggtcttcactgtagcattcttgccccttctataggctggaaagctttccaaataaactatttttaatagcctaatataatctgagccccaagtgtatgggccagagaaacacctggggtgacagtcattatctccacagagatggagagggtgaggtgggactcactttttactcactgcaagtctgattactttttttttttttaactgtgaacatgttatcatttgttcaagacgagacatggctgtagcatgaaggtaaaggcagaggagtggagcagaataaaaagtccagaaataggctgggcgcactggctcacacctgtaaccccagcacatcgagaagccaaggcaagaggatcacttgaggccaggagctcgagaccagcccaggcaacatgggaagaccctgtctccataaaagatgaaaaattagctatgcatggtggcgcacacctgcagtcccagctagttgggaggctggtttgaacccaggaggtcgaggctgcggtgagctacaatcgtgtcactgaactctagcctgggtgatacagcgagaccctgtcttaaaaaaaaaaaaaaagaattgaaatgtgaacaaaaaagaagctaagttataaaagtcttagcagaatttaatcataacctcagaacaggaagactttcccattcatgacaccaaactaggaaaccagaaaaggaaagagtgataagtttgaccacataaaccccaaaatacctgccagacgttaacaatcatcgtaggagaagatgggcaaagaagtacctgcacttgtgtcaccaataaatgagtagctgccataacaaataaagagctcctacgaatcaacaaaatggtgacagataactgtagactgggaaagacacaatcatacaggtcccagaaaatgaggtcagagttcaacctgacgtgtgtgcttacaagaaggaactgtgcaaggaaaatgggccggggagggtggaggtcggggccacggagcttgcaggagctgaggcagctcagagccagcctcggtggtgaccccgtctccctggtggggacactccattttccagctcttgatagaaacacaggtgaccgtcgggaggagtgggagggagctcctgtgtggcgagtcccttcgcctctagtggtctctgctccccttgtggaaacgcagttccaagaaaacaaagaggaaatgctgcgaagagccacaaggactttttctctgagtcacaagaagacgaatatacgctgcaatgacgcagtgagggaagaagtcgccttgcacccatatggctgctgaggatgggagagatggacgcgtcctccgctgccggaacacggagcgcccggtctggtacagtgctgatgctgcgttttgttttctggattttacgacatcttgggggcctcgctaatctggggatgacggccccttccagggtaagcggattcctaaacgttgcaaacggcccgcctgcgagcacactgtgacgtgcagagcaaccaaccgcgagcccacgcacctgatcaaactctcacgcgccacgcccaggttccctgccctgaatcaccccagggccagctcccagaacagggaccaccccaacagccaagagccgcaaacagtcgggagtcaaaccagcccatcctaggcacacccagcccatctaccccgcctggcccgtcccttccaaccaaagcctcgggaactgtaacacaagagcttttcaatagcagtcacctcctgctctcttggcctcaccaggcctgatttaaaccaatcagagtgcatctgaatacacgtaccacctttctgggttacagaagcatagagcctttactgcactgggggtgacagcacctccgtcaacctgggatctgagagatcggggagcaaaaccaccaaagcccccaacacaagcgagaaatgagcctctgggatggccgggagagtggggatgtttgttttagcagcagacgccaagccaggctggctcatacgcgcccacaggcacaggccccgaggcagctgctcccaccccaggctcttttccctgccccagcagccccgcccatgtcagcgcatgcaccgtggccagtccaagcaccgcacgggaagggtgcacagtgggagctgcccgctcacgtccctgtccccactccctgggcgcccaccatgggcagggccggctctgagccttttgtgtgcattgactcatctaatcctcaagggacattgctttccaaatgaggaaactgaggcacggagcggctgggcaaccgaacccaatcatctcagctgtcctcctgccaacagcacaatggaacagagacaccgtccactgagcacagccaccaccagggtcccgacggccccacccagtcccactgccggctcccaccacggcccccaacgctccctacaggggctcctggggcctccctcgcagctcggccatgctgggccccggcggcccccatgctgcccttcctgcatccatcttggctgagggcagctctgtccttccagggctcaggctaaaatcttgatttcaaactcaatcccccctcagccccacactcaaccttcaaaaggtcctgctggctctgcttccaaaatccatcccagatggcgcactgctcatggtccccacctggcccagccccagcttcgcccacctgggccagtgcagtcccctctgccctggttcccctagcccacgtcccgccctcaccccatctgtcctccccacagcagccaccagggggtgcctgtgagctcctgagtctcgcccatccctcctctgcccgcagccctccatggctcccacctcccttggggtcaaagcccaagtcctccctgcagcccacaaggccctgcacaccctgccccgtcccctccctgccctcccctcctcactgttcctctaaaacaccaggcgtggtcctgccccagagcctttgcacagtgcctctgccagacagctccctccacacttccacaaccccctcacttcccctggatctctgttcaagtgtggcccccgagtccccagccttgagggcacctccgccgccactctctcccctcctctgctcggctcttctccgtggcacttgtccactgcgttgcgtgttttgcttttctttgctgtctgtatgtcctggccccactcccagagttccttagggggcctggccctctcgttcccccaggctcccagcacccggccacagcacacgcaggaaagcacacgtagacgatgcccgaaccacaccccactcccggaaaccttcagcagcagccctgcctgcaaagtggaggcatgaggcatttcagtggaggagagcggccgggcagggtgctggggtcctctcttcactcagccagaggccgggtcccctcgcacccccatgccagctcaggcacctgggggccctcatgctcgactccagcccctcccaagctggcctctcagggtggcggggaggcaggtgcaggggctccgagctaatcccctcaggctgtaatccccatgagtactggcaccaccacgggccccgtccagctggcgcctgctggcaaatccttgcagggtcttgaccggcctggtcctgcgtgaagggacatgctgccggggccaggcggcaggcggcaggcggcagggaggcctgggccccgctcctcgttcacagccccaccctgtgtggactctccagccctcctggagcctcggtttccccatctgtaaacaaagacccaggtcgtgcagcttcccaggggctagggcctcacccatccctgtcctgccaggcactcaggacacccgcagctcttgttccaaaagggaaagaaggggccaccatgggggcgcatgcctgtaaccccagcactttgggaggtggaggcaggagggctgcttgggaccaagggttcgagaccctcgcaccctggacaacatagtgagacctcacctctacaaaaaagttttaaaaatttaaaagaggctgggcgcggtggctcacacctgtaatcccagcactttgggaggctgaggcgggcggatcaccaggtcaggagatcaacaccctcctggctaacacggtgaaaccctgtctctactaaaaatacaaaacattagccgggcgtagtggcggacgcctgtagtcccagctactcaggaggctgaggcaggagaatggcgtgaacccgggaggtggagcttgcagtgagccgagaacgcgccactgcactccagcccgggcgagacagcgagactccatctcaaaaaaaaaaaaaaaaaaaaatttaaaacaaagggaagtcacttgctcagaggcacacgggtctaagcggccaaggcaggctcagcccacaccaggccctgggaccaccctgcccaggctcccggagcctccacctgctttgggggtccccactgcctgctcaccccacatcggcacacacctgccacagtgcctgggctcccagtcctgctctgtcctcagtcctcgccaccccagccaccagctccagggcccaggccaaaatccttccaggcccctcgtctgcctccaggcaccggtggcactcacctggacacctgccccaaccccacagagcactgcccacggaccatcccccaccaggcgctgtgaatcgggctcgccgccccactcagatgcccgtgccacccgctgtcctcaggtccgaccccacgcgaccctctcccaccacgttgacttcacttctgcggctcaagtgggtgcagcaagttcccaccccacggcctcggcgcgactattccgctgcctacatcgcctgagccacagcccacccttattcagctcgtggggacagtcacctccctccgagtcctcagctgccgcaggcctggccacttgacctcccaggtgccctcaccacactcatcaccgcccaacgcagcccggctctgggctgggcaaacatcttccgtaaaggaccgggcagcaagtgttttcggcttcgtgggacacgtagccccaagcatggccactcagctcccagctctgccgctgcagcgtgggggccaccaaggccggcaacggaacaaatggtgtggccgttgccaataaaactttgttgacaagaagcggcatggacagattcgggtggggtctcacgtggccacttgttcccatctgcagcctgacgcccagcaacctgagggctccaaggggtcagcgaggcagtcccgttagcaccagaagactgggcaccctgagccccacctggcccacacgaggtgctcaacaaaggtctggagcccaggagtggaactcacactttcacgagccgactcccatggcggaccccagcgcccaggtgagctcgcttggcacctgggccccggaagcagcacacgaaggggactccctctcctccaacagcaacctgggacggagggggcacccagctttctcacggggccggctgcctgtcccgtgccttctaagggctttaccccatgattctccatgcagcccaggagaaaggcagccatcacgcccactttacagacaggtacaccgaggctgcacatccccggctggcatgcaatggcgctgggtgtgaacccaggagggccggcccccgaggcctctccactgggacacccaggctgtggtggtcacagtgcctgacctgcatcccgggaggcggccagggcgggagagaatggggaactttccgtccccagtgtcctcagcctccgcctgggccctgctgacttgcaacaagagacaccacaatcccactgacccttttttttttttttttttgagatacgattctgctgtcacccaggcatgcagtggcacgatcacagctcagtgcagcctcagcctcccaggctcaggtgatcctcctgcctcagcctcctgagtagctggaactacaggtacataccattacgtctagctacttcttttaatttttttttagtagagacaggggtcttgctatgttgctccaggctggtctcaaactcctgagatcaagtgatcctcctgcttcagcctcccaaaatgctgggattacaggtgtgagccaccgtgcccggcctccctgacctttttacacagaccaccacagctacagggaggccctggtggcggtgctgactccctgcccggccgccctgtgaccacactacactgtgctccaggcaggcggggcctctgctggggccatgccctcttcctgcccaatgcccacaggtctccctcggatgccaccttcttggcaaggccttcccagccaccccattctaccttacccttcctccctggcactgctggcctcatgcacctgatgttcaccaggatctgcactgtgctgagctcttccgggcgcaggggatgccgcaggagtggcacagacggtcttggccctcgtggagctctcgctcaggaggagatggtcagaaaacacgtcagcagagccatatgtttcaggtggtgacaaacgctatggtggcacaatcagggaagaggaaccgggagggcaggggacggagaaggggagaccgctgtgtggtgacagcagggcagggaggcctcacggagaggagatgctcccacaaaacctggaaagcgctaagggagcaaaggacacagatgggaggaggggcattccggggtgggggtggggggcagccgtgcaaaggccccggggcaggaccatgccctgcatgctggaggaacagcaaggggcccatgggcctacagcagagtgcagacgggagggcagggagggcagagtgcggaggggagggcagggagggcagggagggcccggggcaggctgtgcagggcctgatgggcttcaaagaggactatgtctttgaccccaagggaggtgggagccatggagggctgcgagcagaggagggtcgggactcgggccgctggtttttaatggggtcctcctggaatgtgggacagggagcagaggaagagcaggggcgccaggcctggctcagggggcaaaggaggactgagctggaccgaggaggactgagctggacggaggaggatcgagctggaccgaggaggaccgagctggacaaaggaggactgagctggaccggggaggaccgagctggaccaaggaggaccgagctggaccgaggaggaccaaggaggaccgagccagacgaaggaggactgagccggacgaaggagaaccgagccggacagaggaggaccaagctggactggggaggactgagccggatggaggaggactaagctggaccggggaggaccgagctggacccgggaggaccgagccagatggaggaggaccaagccggatagaggaccgagccggatggaggaggactgggccggacggaggaggaccgagctggaccggggaggaccgagccagacagaggaggactgagccagacggaggaggactgagctggaccggggagtactcagccagacggaggaggaccgagctgtacggaggaggaccgagctggaccgaggaggaccgagctggaccggggaggaccgagctggaccagggaggaccaagctggacccgggaggaccaagctggacccgggagaggcagaggacagggaaggagtcagtgggttctgggccagttctgaaggtgaagctgccatcatttgctgccagatcagccgtggaagtggggcaggggcagggatgcagctgacctttccagggcatcacagagacagatcagccgtgggagtggggcaggggcagggatggagctgaccgttctggggcatcacagagacaggacagcctgggagaggctcagacacgcccaggccacagctcagaccaaactccaccacaggccatcggcccacacagtgggcacagccgcatcccaagccccggccttcccgagaccgcccccacgtgccccacggccacggcccatggagacgccattcaggccacgcctcgggagccaggagcccaggcaattagaggaaccaaattctaaacaccaacgagacattgctttgcctcccatcggatcagccgaaatcgccaaggacgatgacactgggagctggcagtgccgtgggaaacgggcagcctccctcggcccctgtcggacaaggctcccgctgtagctgagctttctggaaggtgtcgccatcgcttctaacagtgagcggtgactccagaaaccacgggcatgggcctcagcaggggcctggaggcaccgatggtggagaggccggaaaggggtggccaaccggcacgacaatcaccaagcacgagcgccaactcatcccaggctcagcccctagcacacacggtcatcaccccacttcacagacgggacgctgaagcccggggaagtgacggccacacagcacctgaagcgcggagctgggagggggacatcggcgggaccaactctggggctcccccttaaccactgcctggcgctcgccctctctacaaaccgataccaacatagggtggggagactccagatgaccagagataaaaagcaagcagttcacagagtcataaacgtgtggcatttctcaccagggccgtcctgcccccaggggacactgaacggtgtctgggtcacttgtggctgtcacaactggcaggtgctcctggcatggagtgggcagaagccaggggcgttgctcagcacccctaatttcctgactcaaaatacctctgccaaggcacagaagccccagtgaggcatgaaaccatctcggtgaagaacaagcaggcccctttatgtgctcacgtctctgtggcccagccaggcacaacctaaactcaccagcgctaacatcaggagggatggcgttggaggagtgaggcaactctgaattttaaacattcagaagcagtatatggccagctggggtcagatttctgtggatttcagggatgggcagagatgccagaccctgaccttccagccctccccggccccccacccccacccccccactcccccgctctcccaccccaccaccatgctcagtctggagctggcaactttatctgtccccggtgctcccagagcccctgataagatgaatggtcgcggtgtggttttcttttggtcagcgagtcctgggctactttgtctctgaccagctggggtcagagggctgacagcggaagttggggggcccaagaaaggaacccgggctggggcctggtgccctgcctgggttcctccaccatgtctcttgctggccaggccaggacaccggctgcccgcaaagaaaggggcgaggccactggctctggggaaggaaccgggtcacctaccaagcggttccagatggccgccgggagggaagccacgagtgtctttcaaggcggggggtgggggggggacttgatgacttccacactctctctctctccagacatctccccaactcccaggcagcacgcatcgcccgcccgcccgcttgcccgcctgccaaccaaggaagcttcgggaggcctggggggagaaggaggacggatgcccgtgtgggtgtctacagagacgctgctgctggctgcctgggaggagcagaggattttgtgaatccggaaacttccgatttgggagcttgtgacctcgactgagaaggaactgttcccttcctctgggctctgcacaccgtccccacagaagggaaggcccagctgccgccacctacccggctggaggtccaggaagcagctaaagggggcatgagacagccgtgccccccgcccagcccgcagccccaccagtgtgtcctgggggaaggctcggggagaggaaaagggggcgacagggcaccctgtgtgcacagccggggcggtggaggcatcttgagatgtaacccttttcctcccctcattttagcagggaggtaaactgaggcccaggaaggtgaggaaaggtcgcgcacccggactcaggtctggggacttacagaaagggaggtgacatcaggaggtgggcacgcacggcctcagagacccccgcctccacccaagcagccgccactcacacgacgggcagcccctgggagcgggtcaggcagaacggggatccccagcggcgcccacgccgagtcgcccccggcccgggagcggtgggaggtagcccctcgcaggcctcccgcttcccggcgcggcttcagccccgtcctccccgcggctccaggggactgccccgccccaggctcctggaaccggcggcgcccccgcagcgaccgtgcagcccccgccccggccccgcagccccgcgactctcggcgctcggacgagcccagcgggccgcagccccgggaggccgggccgttacctgccgccgccccgctctctgccgcccacgccgcctccgagggcacggcccccgcctcagcgctctccgcctcgtccggtacctccagctccatggccgcgcgcggacggcggcgggggcgcccgagggggacccgagctgcgaccgccgccgccgaacaacaagcgccgccggccaagggagggcgcgccgggccggcgcggggcggacggggcggggcctgcgtgcgtgcgacgccgcggacggcgcgcggccaatcggggctcgggggcggggcctgcttgcgacccgcagccaggagcgcctcgagtgccccctcgcgcccaggggtgggagtacagagccaggctcgccattccatcgtattaggtcagtaagattgacaggcacgatacgtatcaataacattgctgtgcacaacacataccaataacatggatctacacaacacatgacaataatatggatctatacagcacgtgccaataatatggatgtacacagcacatgccaataacatggatctaaacagcacatgccaataacagggacctgcacagcgcatgacaataacatggatctggccgggcgcggtgactcacgcctatattcccggcactttgggaggccgaagagggcggatcacctgaggtcaggagttcaagaccatcctgaccaacatggtgaaatcctgtctctactaaaaatacaaaaaatagctgggcgtggtggcacatgcctgtaatcgcggctactcgggaggctgaggcaggagaatcgctggaacccaggagggagaggttgcagtgagctgagatcgcaccattgccctccagcctgggccacagagtgagactctgtcccaaaaaaaaccacacatggacctacacagcacatgccaataacatggagttacccaatgcatgccaataacatggatatacacaatacatgccaataacacggatatgcacaatacatgccaataacatggatatacacaatacatgccaataacatgaatctatactatatcattgacatggatctacataaaacatacaaatagcattgctatatgcaatacatgccaatcacattgctatacacaatgaataccaataacattgatctacacaatacatgtaactaacattgatacacacactacatgtcaataacattgatatacacactacatgccaataacatggatatacacactacatgccaataacattgatatacacactacatgccaataacattaatgtacacactacatgtcaataacattgatatacacactacatgtcaataacattgatatgcacaaaatataccaataacagtgatatacacagtacatgtaaataatattgatctacacagggccgggcgcggtggctcatgcctgtaatcccaagactttgggaggccgaggcgggcggatcacgaggtcaggagattgagaccatcctggttaacatggtgaaaccccgtctctactaaaaatacaaaaaattagccaggcgtggtggcgggcgcctgtagtcccagctacttgggaggctaaggcaggagaatagggtgaacctgggaggcagagcttgcagtgagctgagatcgtgtcactgcactccagcctgggcaacagagcgagactccatatcaaaaaaaaatatatatatatatagatctacacaatacatgttattaacattgatctacgcaatacatatcaataacatttgcaattaactacctgtttattatcatattgcaaataatatttatattccatcgtttgtattacgtaagtatagatatgttattgttttctttatattattttatcaataataatacagtttgctattataagaaacatataattatagaaatacataataaattatatatatttatgcaaatgtaagtagcaatatttatatccttcttttttttttttgagatggagtcttgctgttgttgcccaggctggagtgcaggggggcgatctgagctcactgcaacctctgcctccagggttcaagtgattctcctgcctcaccctcccaagtaactaggactacaggtacgtgccaccacgcccggctaatttttgtatttttagtagagatgaggtttcgccatgttggccaggctggtcttgaacgcctgacctcgtgatcttcccgcctcagcttcccaaagtgctgggattacaggtgtgagccactgcgcccggccatatttatgttctttatataagcacataataaggcttatgttgtttatgttaatttaagtaataacgtttatattatttacataaatgtaaatcataatgattatattacctatgcacataaataatgtttggggtgggcacagaggctcccgcctgtaattccagcactttgggaggccaaggcaggaggattacttgagctcaggagttctagaccagcctgggtaacatagtgagccctctcatctctacaaaaaaaatttttttaattagctaggtgtagtgagacccctcatctttacaaaaaaaattgttttttaattagccagctacttagtaggctaaggtgggaggactgcttgagcccgggaactcaaggctgcagtgagctatgatcgcaccactgcactctggcctgggcaacagagaaagaccccgtctgtccccgcaaaaaaaaaaaacaaacaaaaaaaacaaaaagacaaattctgtgtggttccactcctaggaggtccctagagttgtcacattcacagagacagaaagtaggatggggggtgccaggggcttggggggagacgaggagtgagtgtttcacaggggcagacttccagtctcagaagatgagaacattctggagatgatggcggtgatgtttgcacagccatgggaatgtgcttaaggccacggagctgtgctcttagacatggtgaaaatgggccgggcgcgggggctcacacctgcaatcccagcactttgggaggccgaggtgggcggattacctgaggtcgggagttcaagaccagcctgactaacatggagaaaccccgtctctactaaaaatacaaaattagccaggcgtggtggcgcgtgcctgtaatcccagctactcgggaggctgaggcaggagaatcacttgaacccgaaaggcagaggttgcagtgagccaacatggcaccactgcactccagcctgggcgacagagcaagactctgtctccaaaaaaaaaaaaaaaaaaaaaagaagaagaagaagaagaaagaaatggtgaaaatgggccgggtgcggtggctcacgcctgtcatcccagcactttgggaggccgaggctggcagatcacctaaggtcaggagttcaagaccagcctggtcaatgtggtgaaaccctgtctctactaaaaataccaaaaaattagctgggcatagtggcacaggcctataatcccagctactcgggaggctgaggcaggagaatcacttgaacctgagaggcagaggttgcagtgagccaacatggcaccactgcactccagcctgggcaacagagcaagactcgaaaaaaaagaaatggtgaaaattgtgaattgtatgttgtgcgtattttactaccattttttgttttttcttttttgagatgagtcttgctctgttacccaggctggagtgcagtggcgtgatctcggcttactgcagcctctgcctcccaggttcaagcgatcctcccacctcagcctcccaagtagctgagaccacaggtgtgtgctaccatacctggctaatttttgtaatttcagtagaaatgggatttcactgtgttggccaggctggtgtcaggtgatctgcccacctcggcctcccaaagtgtgaggattacaggcgtcagccactgcaggcggccttgaccattttaaggctccaggaagagttctttggacgcaggtcatggacagagctcctgattcacccagaatctgttttgaaaaaagatttagaccactggctctcaaggtgtggtccctgggccagccacatcagcctcaccctgggagcttgttagaaatgcaggttccaaagccaggtgcagtggttcatgcctgtaatcccagtgctttgggattgaggctgaggcaggagaatcactttagcccaggagttcaagaccagcctgggcaacatagcaagatcccatctctacaaaacaaattaaaaattagtctggcgtggccagatgcagtggctcacgcctgtaatcccagcactttgggaggttgaggcaggtggatcgcctgaggtcaggagttcgagaccagcctgaccatcacggagaaaccctgtctctactaaaaatacaaaaattagtcgggcatggtggcgcatgcctgtaatcccagctacttaggaggctgaggcaggagaattgcttgaacccgggaggcagaggttgcagtgagtcaagatctcgccattgcgctccagcctgggcagcaagagcgaaactcctctcaaaaaaacaaaaatagcctggcatggtggtgcacacctgtagtcccagctacttgggaggctgaggtgggaggatcgcttgagcccagaagtttgaagctgcagtgagctatgatcacaccactacagtccagcctgggcaacagagcgagacctggtctcaaaacaaacaatgaaaagtaaaagaaatgcaggttcctaggcccccacccagacttcacacaccagaaactgggcagagtagggtggtgggagggcacaatctgggtgttcatgactcctcccttccaggcaaactgggtgccagataaagtttgggggaaggggccagccacggtggctcatacctgtaatcccagcactttgagaggccaaggtgggcggatcacttgaggtcaggagttcgagaccagcctggccaacatggagaaaccccatctctactaaaagtataaaaattagccaggcgtggtggcatgcgcctgtagtcccagctacttgggaggctgaggcaggagaatcacctgaactcaggaggcagaggttgcagtgagccgagattgcaccactgcactccagcctgggcgacagagcgagactctgtctcaaaccaaagaaaaggaaaagaaatgcagtttcccaggctccaacgcagacttcacacaccagaaactgggcggggtggtgggggtggtaaaatctgggtgttcatgacttcccccttccaggcaatttggatgccagataaagtggaggaagtgctggaggttagatcattgatgaggataatgaagaggaaatatacttaaaaaaaattactaaaactggctgaacagtcatgacttacagacgcaaaagtcaacatcaaaacaagcagttaaaagcagcctcttggccgggcgcggtgggtcacgcctgtaatcccagcactttgggaggcagaggtgggtggatcacctgaggtcaggagtttgagaccagcctggccaacatgatgaaaccccacctctactgaaaataccaaaaaagtagccaggcgtagtggcacatgcctgtaattccagctactcgggaggctgaggcaggagaatcgcttgaacccgggaggcagaggttgcagtgagccgagatggcgccactgcactccagcccgggagacagagtgagactccgtctcaaaacacaaaaacaaacaaacaaacaaaaaacttaaaaaaaagaaaactagggcagggatggggtgacaggaggggagaggcaagggacagagaggaggggctggggtccgggagagccaccagccttctgtgccttccccgcatccccccacgcccctggttggctgtccccattacgcagggtggaaaaccgaggctgcccggcgggggccggttgcgtggtttctggcgccgcctggtggccatagtggctactaccgtcagcaggaggtactgcaggctggagggaccctagtccattcattccaaaaacatgtattgagcacctactgtgtaccaggcactgtgctaggccataggacacggcagggatgagcacgacaaagtccatgacctctgtgaggtggcattttaatatttatttatttatttttcagccagcgtcttgctctgtctcccaagctggagtgcagtggcgcgatctcggctcactgcaacctctgcctctggggctcaagcgattctcccgtctcagcctcctgagtagctgggattacagacgcatgccaccttgcccggctaatttttgtatttttagtagagatggggtttcaccatgttggccaggctggtctcgaactcctaactcaagcaattctcccacctcaacctcccaaagtgctgggattacaggggtgagccattgagcccagacttaattttttaaattttaattttaatgtactggtaaagatgggggggtgtctcactatgttgcccagactggtctcgaattcctggcctcaagtgatcctgccaccttggcctccaaagtactgagattataggtgtgagccatcatgcccaacccttcctggttaattttattttattgagataggatcttgctctgtcacccaggttggagtgcagtggcacagtcatagctctctgcagcctcaacctcccagggtcaattgatcctcccacctcagcctcctgagtttctgggactacaggtgtgtaccaccacatctggctaatttttaaaaaagttttctgggctgggcgtggtggctcacgcctgtaatctcagcactttgagaggccaaggcaggcggatcacctgaggccaggagttcaagaccagcttggccaatatggtgaaactccgtctctacaaaaatacaaaaattagctgggcatgatggctggtgcctgtaatgcaatcccagctactcgggaggctgaggcaggagaatcacttgaaaccgggaggcaaaggttgcagtgggccgagatcaagccattgcactccagcctgggcaacatagcaagactctgtctcaaaaaaataaaaaaaaaataaaataaaaacaaaaaacaaaacaaaaccaacaacagccagcagcaacaacaaaaaaacttttctaggccaggctcggtggctcacgcctgtaatcccaacactttgggaggccgaggcgggcagatcacttgaggtcaggagtttgagaccagcctggccaacataggaaaaccccgtctctactgaaaaaaaaaaaaaaaattagctgggcgtggtggtgcacgcctgtaatcccagctacttgggaggctgaggcagaagaatcacttgaacccaggaggcggaggttgcagtgagccgagatcgcgccactgcactccagcctgggtgacagagggagactccatctcaaaacaaacaacaaacaaaagatatataaaaatttttctagagatgggtttcaccgtgttacccaggctggtctcaaattcccaggctcaagtgatcctcccacctcggcctcccaaagtgctggaattacaggtgtgagccaccacacctgaccctttcttgttttttagatgaggacagcaagaagcccctgtaatttgcccaaagccacacagcggggaagtggcagaagcttctgtacgtaggaacccagtcacttcgtagcagagaggcagactgcgcacagatctgcgtggggaagggagtgcgccaagccacagcctgatgggccggcgtgcctggcaggaggctcagcaagcacagagactgggcagctccagatgcaagaagcaggagggagggggactccgggagtgcggtccattcatgtctgaatgtagccaacgagggtttcctaagcacctaccatgtgcggacgcttgataccagggcctcggcggtgagggcacaggcaggagcaagctcacctctgggcaagcaggggttaaggccagttgctcccacgtgagggcaccttgcgacagagccacacacccagtcctcctgctggcccgcccctcaccctggtccgtctccctgtgtctgtggtcgtcagttccactggcaggggacctgcctccctgttgccaccacaagagaggaaaagttggtcaaacaggtggggaggccagagctacaagcctcgggttccctccccaccacccgtgccaggcaggcacccgggccctggcacctgctgcctgcccagaggccacccagcctcctagacaggtaagtcccccgccccactgtgcttttccacccagtgtgcattgtctgagctggccttccccagctgagggtccttagactcccccccaacctcccccaccacgagctgtctccccggctcctcggaaagcaggaaactgacactcctgcgtgggcatctgacatagtttcgtagggattatctgaccggcagttactgcacctggcggcctgcccaggacgctgagctggaaacttaaaagggtcattgttacctaggtggcgcagggaccggggaggcggcaaaggggcacaggttggtctctgatccccctaactgaggaggggaggggatatcagtccagacggagcctgggtttacctcctgcagcccgaggctaggaggtgacaggtgggaaaggctgcgacctcactcatctctgagcctcctggaacttcttaaaaggctcccaagttttgaaacaactgcgtctcccgccccccaacccctcaccctgttctcaccgctggaacctccaggagctttgcagggagggattggggtggcctttcttttgctaattttttttttgagacggagttttgctcttgttgcccaggctggagtgcagtggtgcgatcttggctcactgcaacctctgcctccacctctgcctcccgagtagctgggattacaagcgcccaccactatgcccagctaatttttgtatttttagtagagatggggtttcaccatgttggccaggctggtctcgaactcctgacctcaggtgatccaaccccctcggcctcccaaagtgctgggattacaggcgcaagccactgcgcccagacttctttttctaatctttactcctccgagcaaaatctctgtgggatggggcagaggggaaggaggaaggagcgctcagagccagagaggggaggggtcggcagcaaaagtgtttttctgggtcatttgctcccaaatgggaagaccaagggagcttcctcgtgagccaagtgtccgattgcatctcaagtctctctccagaaccaagagggtcccccggggccgaggaggcatggatgatcgcatagtgggggacagagcggcccggcatttggggtcaccttgtggctgtgtggctgcagagctcccagggagcaggcttgcttgagattcgggagtccgtgggggtgggcgacatggatcccaccttgcctgggttttgagagcaaacccgtggactcagttagatctggcttccacacctcccttctctccgggcctctgtttcctgctctgtaaaatggggatattgagggccgggcgcggtggctcacgcctgtaatcccagcactttgggaggtcgaggcgagtggatcacaaggtcaggagttcgagaccagcctggccaacatggtggaaccctgtctctactaaaaatacaaaaaatgagccgaatatggtggcaagcacttgtaatcccagctactccggaggctgaggcaggagaattgcttgaacccaggaggtggaggttgcagtgagccgagattgtgccactgcactccagcctggacaacagagtgagactctgtctcaaaaaaaaaaaaaaaaaaaggggtggggggatatggagtcaccaaggcacagggctgttgagtgccggatgtaataaagcgggtaacagattctcggtcattctggggtcaagacgagctatcccggtccgaatcggagtctggtctcatcagcttcctggtttgtagaggatgaaccctggctcagagaaggacagccgcttaccccgggccgcacagccaagtagaaatgtcaggcggccaagagtcaagacgcagaggacagggagctggtggcgggggtggtgctctggaggctggccctgcccccagctgatgcctcaggctcagcatctcgagaaagtcctgccccctggcttggtgcttcctcgtggccctgagtcccggggaaagtccagggcagggagtatgggtacttgttcttcctctttagggctggccaggggccaggggagctgtgtttgctcagggtggaacctgacaccctttggaatggattgaggttagcggaagcctaggctggggggaggggtcgcccagggagcgaacgggcatttattgtgcacttactgtatgcgcgagtgtggggtcaccaggccttggagattcagcagtgagcaaggcaggccaagcttcctgctctcgtggggcgcatattttggtggggaaagacagacatgaaacaagagcgcagtaatggagccaatggctgcacagagggtaacatgcgtgagaggcgctttgtaactttattttactttttatatttttttgaaacggagtctcgctctgtcgcccaggctggagtgcggtggcgcgatctcggctcactgcaagctccgcctcccgggttcacgccatactcctgcctcagcctcccgagtagctgggactacaggcgcccgccaccacacccggctaattttttgtatttttagtacagacggggtttcaccgtggtagccaagatggtctctcctgaccttgtgatccgcccacctcagcctcccaaagtgctgggattacaggcgtgagccaccatgcccggccttattttatttttttttgagatggagtctcgctctgttgcccaggctggagtgcagtggaacgatctccgctcgctgcaacctccacctcctgggttcaaagcgattctcctgtctcagcctcccaagtagctgggattacaggcgcccaccaccacgcccagctaatttttgtatttttagtagagacagggtttcaccgtattggtcaggctggtctcgaactcctgatctcaggtgattcgctcgcctcggcctcccaaagtgctgggattacaggcgtgagccaccgcgtccggccaaaatgaagggagagctttaaatgctggcctgaagacatttggctttatgatattaaaggatattttttcccaaaatagtaaaatcattactctcatacaaatacaaaatgaggccggatgcggtggctcacgcctgtaatcccagcactttgggaggccgagacgggtggatcacgaggtcaggagttcaagaccagcctggctaacatggtgaaaccctgtctctactaaaagtacaaaaaaaaaaaaaaaggtgctttatgtgtctgcttaattcattaattaatatgggaaccggtaagactttatagcctatacagaggggaattaatttgtttcctttctttcttttttttaaaaattgaaaatagaaatggggttttgctgtgttggccggcctggtctcgagcttctgggctcaagtgatctgccagcctcagccactcaaagtgctgggatttcaagcgagagccaccgacccggcctcagcattcttgattgcctgtgtgtgtgtgttctttcagttctcctctggaccagacacggtggctcacgcctgtaatcccagcattttgggaggccaaggcaggtgggtcacttgagcccaggagtttgagaccagcctggcaaacgtggtgaaactctgtctctactaaaaatacaaaaattagccaggtgtgttggcgtgtgcctataattccagctacttgggaggctgaggcaggagaattgcttgaacctgggaggcagaggttgcagtgagccgggatcgcaccactgcactccagccccagagacagagcaagactccatctcaaaaatgtcattccgtgcccagaatgacagcaccttagcgtagatggtttccatggggcagggggccccctctagccctgggacactgtaattcacctttggctttcccactgggggcccgagtggagttagaagcatggagaggcagcccaggggatccttagtggcagatgcttaaacctttgagccttccctgaaatactgctcagggtcaaaaccgggatccccgttttacagatgaggaagctgaggcaggggctggaattcacatgggctctgcttttctctctctgctgtggaacttccttctagagctcagccgtcctcccttttgggggaaatggcatctttggcatggcttggtggctcccgcctggaatcccaacattttgggaggccgaggtgggaggatcgcatgagcccagcagttcaagacaggtccgggcaacatagcgagataccgtctctacaaaatatacaaaaatctgctgggcagggtggcgtgcacctgtggccccagctacacaggaggctggggtgggaggatcgcttgagcccaggaaagtggaggctgcagtgagctatgattgcaccactgcactccagcctaggtgacagagcaagactctgtctcaaaaaaaaaaaaaagaaaagaaaagaaagtcccctgttgaacaccctgagctgcattccatactccaagcttctagcaggttccacactcctcctacttcaaagtgccccccatgagtcctacttcaaagtgccccccatgaggtcctccagcctccccaggacgccaaaccctgagacgttcttcagccctccagtgccttagggctgagccggccacacctagaatctgcccttcctcaaaggtcgtttggatcttggcaacccacagaccggggcgtctcctcccacctggctgccctccatctctgctctctgtctctgctcctgccccgtcctctccacacggcttccttaaaacctcccagggtcccccaaaacccatgacgccagtctagtcatgagggaaacagctggtccccaatgtccccacattgagagttattctgcaaaagacctgcccagcacagactaacaggtcacagaacaggaaagacagaatcggtcacagcccagcggtgtctaaggagacgtgacagccaactaccaggtgggatcctggatggggccctggggcggcaaagggcctgcggagagacgtgaataaagtgtggagttcagtgaacaaggttgtactgatgttgacttcttggttttgacatatgtacccgtgtaataatgttaatgttagtggaaatcagttgggtgtataaaggaattctctgtgtatttacttttctgtaactttaaaattattattattatttatttatttctttttttgagacagagtctcgctctgtcgcccaggctctggagtgcagtggcacgatctcggctcactgcaacctccgcctcccaggttgaagtgattctcctgcctcagcctcccgagtagctgggactacaggcgcccgccaacatgcccagctaattttttttttttttttgtatttttagtagagacggagtttcaccgtgttggccaggatggtctccatctcttgacctcgtgatccacctgtctcggcctcccaaagtgctgggattacaggggtgaaccaccacgcccggcctattattattactattatttaatttctttgttgttgttttgagacagagtctctctctgtcacccaggctggctggagtgcagtggcgcaatcttggctcactgcaacctctgcctcccggttcaagagattctcctgcctcagcctcctgagtagcagggattacagcagcccgccgccacacccggctaatttttgtatttttagtagagacagggtttcatcatcttggcctggttggtctcaaactcctgacctcatgatcctgcctcagccccctgagtagctgggattacaggcacgtgccactacgcttggctaattttagtatttttagtagagacagggtttcaccatcttggccaggctggtctcaaactcccgacctcgtgatccacccgcgttggcctcccaaagtgctgggattacagatgtgagccaccgcgcccagcccgttcttttagtatttattgagcacgtactgcatacacagtgatggggctgcagaagaactgattgacagacacagtggaagcccacagtctttaggggagacagacaataattgaataatcgcatatgtaactaaaaagtacaattaggccaggcgcagtggcacacacctgtaatcccagcactttgggaggccaaggcgggcggatcacgaggtcagagttcgagaccatcctggccctgatccactgggggacctcagcccagcccctgctatctctgggcctcagttttcccacaagcactcagaaggggttgagctggctcatcccagggaggcctccagaactccaccttccctgggtcctcctgtccctcaccctgctcagatcacactggccctgaacgctggttcccaatcacacgtcatatacttggcttgcaacagttttgttgactgagtgactgaatgcacagaagaattaaggcacaaatgaagtagattgctgaaaagcagattttctctttttttccttttctttttgctattattatttttacttcgtgaggcaacagtagaaaaccaggttttttgtttgtttgtttggttggttggttttttttttttttgagatggagtctcgctctgtcgcccaggctggagcgcagtggcgcaatctcggctcactgcaacctccgcctcccgggttcacgccattctcctgcctcagcctcccgagtagctgggactacaggcgcccgccaccacacccagctatatttttgtatttttagtagagatggggtttcaccgtgttatccaggatggtctcgatctcctgacctcgtgatccgcccgcctcggcctcccaaagtgctgggattacaggtgtgagccaccgcgcccggccaaaagcaggtttttaattcattaaggtgatccgaaggtcaggggtggtgggaataaggggcttaaggctatgcccatctccaaagccttggatttgaacccaggtttggaggatggtactagggagccatcgagtgttcttgagcagggcatggatatgagagcagacggtgggtggttggaggaagacaatgtgtcctggtgcagttatccagcttcctctcttagaggggttgacagtgggatttctctgcgttgcccattgacatttggggccagatccttctctgggatggggccattctgggcaatgcagggtgcttagcagtatccctggcctccactcactcatgccaggagaaccttccaggtttatttttttattgtttcattttattttatttttttgagttggagtctcgctcttgtcatccaggctggagtgcaatggcgcaatctcggctcactacagcctctgcctcctgggttcaagcaactctcctgcctcggcctcccgagtagctgggattacaggcacccaccaccacactcggctaatttttgtatttttagtagagatggggtttccccatgttggccaggctggtctcgaactcctgacctcacgtgatccacccacctcagcctcccgaagtgctgggattacaggcgtgagccaccacgcccgacttgttttatttttgagatggagtcttgctccattgcccaggctggagtgcagtggcgccatctcagatcactgcgacctctgcctcccgggttcaagtgattctcctgcctcagcctcccgagtagcagggattacaggtgcctgtcactacgcccagctaatttctgtattttgagtagagacggggtttcaccctgttggccaggctgctctcgaactattgacctcaagtgatccgcccatctcagcctctcaaagtgctggaattacaggtgtgagtcaccgcgctcggcctggtattgaacaccaaaatgtctcaagacgttgccaagggtccccctctggtgagaggcactggcttggagttcgaggtgcaggggcaaacagagctgcagccaaatccctcaggccagctcaccatctggcctcagttttctcagctgcaaagtgggcgcacgagtgttgtgtgtaactggggctgcagccaagcatatgccagtaaacatggcccgggagccccattcactgctaggactttaacccacttatttctttatttatttttgagacagcgtctagctctgtcacccaggctggagtgcaagggcaagatcatggatcactgcagcctcgacctcctgggctcaaatgatcctcccacttcagcgcctagaggtgcctgctaccacacccagctcatacatatatatatatatatatatattttttttttttttttgaaacagagtctcagtctgtcgcccaggttggagacagtggcacgatctcggctcactgcaccctctgcctcccaggttcaagtgattctcctgcctcagcctcccgagtacctgggattacaggcgggtgccaacacgcccaggtgacttttttttttttttttgagacggagtttcgctcttgttgcccaggctggagtgcaatggcccgatttcggctcactgcaacctccgcctcccgggctcaagcaattctcttgcctcagcctctctagtagctgggattacaggcatgtgccaccacacccagctaattttgtatttttagtagagacgaggtttctccatgttggtcaggctggtctcgaactcccaacctcaggtgatccgcccgcctcgacctcccaaagtgctgggattacaggcacgagccaccacgcctggcccatgactgttatatttttagtacagacagagtttcaccatgttggccaggctggtctcaaactcctgacctcaagtgattcggccgccttggccatccaaagtgggattacaggcgtgagccactgtgcccagccatagcttatatatatatatatatatatataattttatttttttttgaaacatagtgttgtgctgtctgccctgtcacccaggctggagtgcagtggcgtgatctcagctcactgcaaccgccgcctcccagggtcaagtgattctcttgcctcagcctcctgagtagctgggattacaggcgcctgccaccatccttggctaatttttcgtatttttgtagagatgggttttgccctgtgggccaggctggcctccaactcctgactcaagtgatcctcctgccttggcctcccagagtgctgggatgacaggcatgagccactgcaccctgcctaagatatttttaaaaatttttgtggatgtggagatgggggtctcactgtgttgcccaggaatgagagtacagtggtgtgaccatgacttactgcagcctccaccgcctgggctcaagcaatcctcccagctcagcttcccaagtagctgggagtacaggcaagtgccaccaagactggctaattaaaaaaaaaaaaaaaggccgggcacgatggctcacgcctataatcccagcacttagggaggccgaggggggcggatcacaaggtcaggagtttgagaccatcctggctaacacggtgaaaccccatctctactaaaagtacaaaaatcagccgggcatgtgcctgtagtcccagctactcgggaggctgaggcaggagaatggcgtgaacccgggaagcagagcttgcagtgagctgagattgcgcctgggcaacagggcgagactccaactcaaaaaaaaaaaaaaaaaaaaagtgtgtgtgtgtgtgtgtgtgtgtgtgtgtgtgtgtgtgtgtgtctgtgtgtgtgtagagatggaagtctcactctgttactcaggctggtctctcctggcctcaagagatcctcccgcctcggccttccaaagtgctgggactacaagcgtgagccactgttcctggccaagcctcttattttaaagacgctgaagtcagaaagcctgtaggacaggaatgcagcattttcttttcttgcggttttttttttttggggtggtggggggcggggtggacagggcctcactctgtggcccaggctggagtgcagtggcgcaatcttggctgactgcaacctctgcctcccaggtttaagtaattctcctgcctcagcctccctagtagctgggactacagacgtgcgccaccacgcccagctaatttttgtattttcagtagagacagggtttcacaatgttggccaggctggtctcgaactcctgacctcaggtgatctgcccgaatgcaggattttctaccagctccagtcccctgcagaacccctgtccgattttgccagacctaagcagagactgctttgagcaatggcagccacgaaccttgacgtgtgcgggccggtagggaatgatgtgtttttctcacgactcattaaaacaaatacacggctatttaaagatcgctggactggccgggcgtggtggctcacgcctgtaatcccaacactttcagaggccgaggtgggtggatcacctgaggtcaggagttcgagaccagcctggccaacatggtgaaaccccgtctctactaaaaatacaaaaattagccacgcgtggtggccggcgcctgtagtcccagctactcaggaggctgaggcatgagaatggtgtgaaccccgcaggcggagcttgcagtgagccgagactgcgcccggcactccaacctgggtgacagaatgagtgtccgtcttggggggtggtggacatcgctggaccttaatcatctaaaatgattttttgcgccacctgctggtggcggagtgtcacacagggaagggctgagttgcctgtaggtatacagtaggtgttcagtaagccttagttttggttaatggtgtttctacattggctcagcatggggtcttggaaagagtttggggctccaggaacccatgctgtgcaaccttcagtgagtctggggccctttctgaaccttcatctataaaatatgtgtgtgtgtgtggctgggagtagtggctcatgcccataatcctaacattttgggtggccgaggtgggctaatcacttgaggccaggagttcgagaccagcctggccaacatggggaaaccccatctctactaaaaatacaaaaattagccaggcgtggtggcgggtgcctgtagtcccagctactcgggaggctgaggcaggagaatgacgggaacccgggaggcggagcttgcagtgagccgagatcgtgcctgcagtccagctgggcgacagagcgagactccgtctcaaaaaaaaaaaaaaaaaaaaaagaagggaagacatataaccttcatgcgatgtgagaaggtgcgttgaaatgccttctacaattcttgcttcggtcggaagtcacaaagggattgaacttcattttggctgctcccacttctgtgatggccgcaaaagggaagagaactacatgctcctttttatttattttgtatggagattgggtctcgctatattgcccagcctggtctcaaactcctggcctcaagtgatcctcccacctgactcttcaaagttctggaattacaggagtgagccattgtgcctggcctctacgccccttttaatcctcctgacaaccctgtgatgtaggggctattattttccccaattacagatgtggaaactgaggaacagagaggggcagtaagttgtctgaggtcacacagcaaataggtgagagctggttttagaactctcctagctctgaagttccaagtgggtccccacaagaggctttggcaatgctttattcgggcccttggagacccttgaggggctgactgtagctgacttgggtctctggactagtgttttgggtacaattgcagtggaggaggtgagatgtcatcttcggggaccctctaagactttgatattgttggccttgtttactaagcaaactcttaaccaaccttcaaatccccagctacgatgccccctcctccaggcagcctttcttttaccgctagagttttctctatgctcttcacccctagccacaacctgggactcctgtccctgcccagccctgactggataaggctgggaaggggtgtttatgtgtagctttgcccttttacccttttaaccttggggtggggcccaggcacagctgggcgcaggtttttttttttatagtaaggaatgtgggggtgcagccacgaccagccccgcccacccaggtgacttgaaggtttcctaccctggtccagtccctcctaggtctaaccttaggaatcccggaatcccaggcccctgagcgggaggctgggctgggctgggtgagaagaaggaaacgacctttactccctcccagagcctgaagaatttcctcctgccttgcactctgcccctttcttttccttcgttccttccttccttcccttctttccttccttccttttctttttttttttttttttttgagacagggtctcactctactctgtcgcccagactggagtgcagtggcgtgatatcagctcaccgcaacctccgcctcccgggttcaaccgattctccttcctcagcctcccgagtagctgaagcatgcgccaccacgcccggctaatttttgtacttttagtagagacagacgtttcaccatgttggtcaggctggtctcgaactgctgacctcgtgatccgctcgcctcggcctcccaaaatttggggattacaggcatgagccaccgcgcccggccctgccctgccccctttcttttctggatgctgggtgtgaagacagagcccgcaggccaagaccgcaggaaaaaggcacgcagccgctgttgtatcttcagagtccacgcctctggcctctggggcctccggttcccctctgtggaatggggcaaaccttccagagataaggtgacccagggaccagcgctatgctaaggaggtctctggccttcgacaagcttctaatccaagaggcctcccagatgcacctcaaaatgtgcccatttcgcggacggaaacaccttccaaatagtaggctccgttccaagcgcgggggttattcctgccgggtcttgctggcagccttgtcgggccgggctctggccgcggccgccggccccctctcggctgcgtggataacccggcctggagtttccgcctcaggacctggctcctgtgatgggaggtggggagagaaacctccgccgcgtccagggggcgtgtctgggcaggggcggggctgacccgagacctggaggaggaagaggggcaggtgcagccgggagctgcggagctggagggaggaggacgagagcccggccctcagcccgctgtgactctcctcagccccctcccccagcccggggtgggggccgattgactgtttccaggaccccctcgggtaggggggctggagagcccccaggtggaccatggcggtgagattccaggcgagtaaccctccaagggtggcagggggaggggctcgggctgaggtggggtggggggaaagcagggtttgggagtcggacccaggaccccagaacgcctacctacataacaggcagggaaactgagtcccagagggatgaagtggctagctggaggttgcacttcgagatgcgtccgcgcgtccgcgcccccctccctgcctccaaagaccatctcttctggagcctcctctgccccaggaccggcctcctttaataccgcagggctgggttcaaatcccgaattttctgtccactatgctgtgtgtaacgtggggccagtgagtgaaccctctccttccctcatccgaaaaatgggtgatcggcattttaaacagagagaaaaatgtgttttaagagcttggcgcatcgtaggtgggcagaaaagatgttcatccccctttgctgggggcgtgcagccggctgagcttgggcgcccgcggtggcacggtgggcagtgacttcatttgggggctggggtggctttggtgaacattcacctcctacaaggctgcacgagggagcaccagcatttattgggtgcctactgtgtacaaagctattaacaggcattaccaggcagaggcaggggtggggtgagcaagccggctggggtgcgccgtggcgggggcggggcggggggcgatccttgtctccggagggatttcaccctccaggcatggagcctgggctggtttcttcagacccaccagccagggtagactgggactgcagcggtatgcggccagacccaggccactccgccccaagcttcaggacccggcacttctggttcccgctgacttcttccttgcctccaggcacagctctcagaatcccctccccaatcggtgtatttgttcgctgaaaccgccctctctgccattgttcctggagatggggtggcggggggggggggcacaggggacggcggcccgggagccccgtacccgggggcggtgtgacttggtaccggccccgtcccctctgggcgggcctcttgttcggtgtttgtgtccagccctgggcggggggcggggacaaagacccaagccccaccctctcagagttcacctggacaggggcagggctgggaactcaggacacacctgttgagcacctggccacagtgtgttttactcaaccattcactcattcctcaaactcttccctaagggggcctggtcctatggggtcccaggggcccatccctgcccatcgggagcgctcagactgagggggaaggtgtaaggtggacaaatccactctgacatcccacaccccaatcatcacatttgggccagagggaaggatgtatgatatgcgtacggaggaagaggctggggctgtgaaggatgaataggagtttgccagggagtccagtaccagcactcaaggcctggaaaggaggctgatggccaatcacctgggccttaagtagccagagagacagacatgtctcctttcacagcctaagaggaaagaccagaaacatactaaccgatggttaaagagaataaagatgatttttagatgccttgaataaaaaataataaaacaggctgggcgtggtggctcactcctgtaatcccagcactttgggaggctgagggaggtggatcacctgaggtcagcagtttgagcccagcctggccaacatggtgaacccccacctctactaaaaatacaaaaattagccgggcgtggtggttggacgcctgtaattctagctacttgggaggctgaggcacgagaattgctggaacccaggaggcggaggttgcagtgagctgagattgtgtcactacactccagcctgggtgacagagtgacactctgtctcaaaagaaaaaaaaaaaatatatatatatatatatataaaataataaaataggcaggagtgataggggatcagagaagactggttagctaggtggtcagggaggacttcctgaggaggtggcatttgagcctagacctcagtggcaggggccagccaggcaggaatcccgtgaaacatgtcccagattcaggggacagatggggtaaaggtttggaggtgaactaagatgaggtgggctgtgaggttaggcttaatccctcaggcactgtggagctctggagggtttagacaaagcttctggtttccatggagacgaacccgcacaagctgggacaagcctggaccacctggactccctcgcccctctcccactctgggttcgggggccctggttccctggggctgtctcttttttttttttgagacggagtttccctctgtcgcccaggctggagtgcagtggcacaatcttggctcactgcaagctccgcctcccaggttcacgccattctcctgcctcagcctcctgagtagctgggactacaggcgccggccaccacgccctgctaattttttgtatttttagtagagacggggtttcaccatgttagccaggatagtctcgatctcctgaccttgtggtctgcctgcctcagcctcccaaagtgctgggattacaggcatgagccactgtgcccgggcagggctgtctcttaaagtcaggaaatacaaattccttggggccatttaaaaattttttttgagacagggtcttgctctgtcgcccaggctggagtgcagaggcacgatcacaattcactgcagcctcgacctcctgggctcaggtgatccttctgcctcagcctctcgaggagctgggaccacaggtgcatgccaccatgcccggctaatttttgtatttttttgtagagatgagggtctcactatgttgctcaggttggtcttgaactcctgggctcaagcaatcctcttgcctcggtctcccaaagtgctgagattataggcagaatccaccgtgcccggccctggggccatttaatgacacaaagtataacatcaaagcaggttaaaaaaaaaaaagatgcagttttgaaaaataagctcagaagaaaaagagtaaataatcagaaagccactgtagcctggtggttaagagcaagagtgaggctgggtgcggtggctcacgcctgtaattccaacactttaggaggctgaggtgggaggatcgcttgggcccaggaatttgagaccagcttggtcaacatagcaaaaccccatctctacaaaaaaacaaaaaaatatgctgtgtgtggtggtgcatgcctgtggtcccagctacctgggaggctgaagcaggaggatcccttgggcctgggagttcaaggctgcagtgagctgtgattgagccactgcactccagcctgggcaacagagtgaaaccccgtctcaaaaaccaaacaaccaatcaaccaaccaaccaaccaaaaaagagccagagaacagggcaggctgccaagttcaccactgtgctgcgtgacctcaggcaagttactgaacctctctaggccccttttaatctcacctctaaagtaggaataataactgtgccacttcctaaggtcactctgaggatgaaatgaatgggtccacatcaagcgcctgcttgcagccaggttcaagacagcctgaccaacatggtgaaaccccgtctctactaaaaatacaaaaagtagctggctgtggttgtgggtgcctataatcccagctactcgggaggctgagtcaggagaataacttgaacccaggaggtggaggttgcagtgagccgagactacgccattgcactccagcctgggcaacaagagcaaaaaaccccatctcaaaaaaaaaaaaaaaaactacacaaggagaaagtcattatttggccaccacctccccaaggctccttctgctttttgcttttcaggcattgaatctgtacccttttcccaaaccacatccctgcaagacagggcagcagtgccatttcacagatggggagactgaggctgggagaggccccgccatagctagcacgggtgggcagacttgggatttgagtccagtcctgagcgctgccctggctccttcagaactgcagagccctgccctctgctctgtttctctcccctccacccgccttcccactcctggagatcaggaatgctggcctcgctagagacgctggagcttataagaaaaggcactggagcgcaccaatggggggtgcctgggcagagggaatcacacacccgctgtgccaagcctagaaaacccgccccggggaggaggaggagtcacttctacaaactccctccccactccctccacctgtcccctgcctggggagcagggcatggtgcgtgctggcaggagggaagggagggtggaggcgtggccaggtgaccttgcacctgagtctggtgttctcattcatgccatggacatgaaaataacagaatctgcctggtgtggaggctcacgcctgtaatcccagcactttgggaggccaaggcgggcggatcacttgaagtcaggagttcaagatcagcctggccaacatggtgagacccccgtctctattaaaaatacaaaaattagctgggcatggtggtagacacctgtgatcccagctacttgggaggctgaggcaggagaatcgcttgaaactaggaggcagaggttgcagtgagccaagttggcaccattgcactccagcctcagcaacagagttttttttgttttttttttttctaagtgggaaagcccaggtgggaggatcatttgagcccaggagttcaagaagagtctgggcaacacagcaagaccctcctgtctctataaaaatagaagttaaaaaattagctgggcatgatggtatgcacctatagtcccagttactcaggaggctggggcaggaggattgcttgaagccaggagttcgaggctgcagtgagccataatggctcacacttgtaatcccagcactttgggaggccaaggctggagaatcacttgagcctaggagtttgagaccagccttggcaacacagagagactccatctctacaaacaataaaaaaaattagccgggcatcgtgatgtgtgcctgtggtcccagttacttgggaggcagaggtgggaggatcacttgagcctgggagttcgaggctgcattgaaccgtgatcacaccactgcactccagcctgagtgacagagaccctgtctaaaaaaaaaaaagtgtgggaggggggacttcatggctctgtgcctcagtttcctcatctgtaacatggggataattgaatgcacctttgatgaatgtattaaatgagatagtacatgtaaggctgggcgcggtggctcatgcctgtaatcccagcactttggaaggccaagggggtggatcacaagatcaggagttcgagaccagcctggccaacatagtgaaaccccgtctctactaaaaattcaaaaaaattagctgggcatggtggcacatgcctgtagtcccagatacttgggatgctgaggcaggagaatcacttgaacctggaaggcggaggttgcagtgagccaagatcacgccattgcactccagcctgggcaacaagagcgaaactctgtctcaaaaaaaaaaaaaaaaaaagagatagtacatgtaaagcacctggcacaaaggaagtgtttcattcattcactcattaattcattcagcaaatccttcttgaatccctgctgcaactcaggcgctgttctaggcagggaactgagggctcagttttggacaaagacaaaaatctctgccctctgtgggtggatcagttgaggtcaggagtttgagaccagcctggccaacatggtgaaatcccgtctctactaaaaatagaaaaattagcctggcgtggtggtgggcacctgtaggtgcccagctactcaggagcccagctactcaggaggccagtaggcagccagctactcaggaggctgaggcaggagaatcacttgaacttgggaggcagagactgcagtgagcagagattgtgccactgcactccagcctgggcaacagaatgagactccgcctcaaaaaaaacaaaacaaggctgggcacagtgactcacccctgtaatcccagcactttgggaggccgaggtgggtggatcacttgaggccagaagttaaaggccagtctggccaatgtggtgaaaccctatctctattaaaaatataaagattagccaggtgtggtggtgcacccctgtaatcccagctacctgggaggctgaggcaggagaatcgcttgaacccgggaggtggaggttgcagtgagctgagatcgtgccactgcactccagcctgggcgacagagccagactctgtctcaaaaaatgaaacaaaacaaaaaaacaaacaaaaaaacctgaggccctgagagaggtagtaacttgtcacaggctccaaacacaggcctgtcagagctggactccccaccctgagctggggacccccaagtgctcagatgaacctgtgtggcctcatgcccatcttccccgctcccctcgaccaggtggctgacatggaggagctgaccatctgggaacagcacacggccacactgtccaaggtgaggcctccctctccctgtctgggtgccagagagtatggcggcttaggcccagctcaatagaggggagaccctttaccctgggggaaacagcagctcttccttcccctcatcctctctcaggacccccgccggggctttggcattgcgatctctggaggccgagaccggcccggtggatccatggttgtatctgacgtggtacctggagggccggcggagggcaggctacagtgagtatccaggcagctgggttctggcgggggagggcacgtggagaggagaaaccaggccaggcacagtgactcacacccgtcatcccagcactttgcgaggctgaagtgggcggatcacctgagttcaggagtttgagaccagcctggccaacatggtgaaaccccgtctctactaaaattacaaaaattagcgggatgtggtagcgtgttcctgtaatcccagctactcgggaggctgaggcaggagacttgcttgaacccgggaggcagaggttgcggtgagccaagattgcgccactgcactccagcctgggtgacagagtgagactctgtctcaaaaagaaagtaagtgaggtgaggagaaacctttgtgagcctggcactttccagctctgtcaacacagggctcggacttggcagtaggacagtgtcagagacttgggcctcacttccctaaggtacttcctggtccttcacaggaattcttggggtcatagtggccccagagcccttttggaacataaagtcctggaaaccatcgagtgtttgagggtttgatgcttcttggaattatgttgttaaaatggttctgggccccaagtggctgacaggtgatatggctcagcccagcccagaattagggaccaccaggttcagagagaaagagctagaaagaaaatatgaaatacagacaggaagagagggaaagaaaagcagaaagtggggatttgtggtgtggggagcgaggagtgagaagatgccaggtgtagctgtagcttcaaggccgggtgcagtggctcacacctgcaatcccagcactttgggaggccgaggtgggcggattacctgaggtcaggagttcaaaaccagcctggccaacatggtgaaaccccatctctactaacaaatacaaaaattagacgggtgtggtggcgggcacctgtagtcccagctactagggaggctgaggcagaaggatcgtttgaaacgaggaggtggaggttgcagtgagttgagatcatgctactgcaatccagcctgggcaacagagtgagactctgtctcaaaaaaaaaaaaaaaaatgtagcttccactctatgattatagtaggttctacaattggctccattttacaggtgagaaaacggaggcccagaaggataaatgtctttgtgaacctagggacaccaatgaattagaaccaggccttgtagatctggaggttccaggggcaccccctccccagggagggcttgttacgagggtctcccctgcaaagcctcctccgtaagacccgccctcctctctcaggacaggcgaccacatcgtcatggtgaacggggtttccatggagaatgccacctccgcgtttgccattcagatactcaagacctgcaccaagatggccaacatcgtgagtaggcagcccctggcatggccagcatctctgaccccagcctgggtcgtgccgctgtgggggttgtaagcttctgagagcaaggagtcatcttctcatcttacagtttggacattgaggcccagagagagactggtgtcccccagggccacccgggggctgagcagagcctcccccagcccttgcctgtagctgacccttcctgtcccctcctctaacagacagtgaaacgtccccggaggatccacctgcccgccaccaaagccagcccctccagcccagggcgccaggactcggatgaagacgatgggccccagcgggtggaggaggtggaccagggccggggctatgacggcgactcatccagtggctccggccgctcctgggacgagcgctcccgccggccgaggcctggtcgccggggccgggccggcagccatgggcgtaggagcccaggtggtggctctgaggccaacgggctggccctggtgtccggctttaagcggctgccacggcaggacgtgcagatgaagcctgtgaagtcagtgctggtgaagaggagagacagcgaaggtcagaagaggcgggaggtcggacacgatcagtactggacacagggcaccgtggtcggatgggcgacggtttcaagtgattctcctgcctcagcctccctggtggctgggactccaggcgcccgccaccatgcctggctaatttttgtacttttggtagagatggggcttcaccatgttggcaaggatggtttcgaattcttgacctcaggtgattcacccacctcggcctcccatagtgcttgctgggattgtgggcgtgagccaccgcgcccagcctggaagctacaactacacctggcatcttcttgctcctcgctccccccaccacaaatccccactttctgcttttctgtccctttctgcctgtctgtatttcatatattctctctagctctttctctctgaacctggtggtccctaattctgggctaggttgagccatatcacctgtcagccacttggggcccagaaccattttatcaacatgtccccgcgctgatccccgggacctctgtttaggccacctcacttagcaagagggactcagcagatgggatggagtgaaggaccctgagctcagaggtgatcctggatgatctggggggcccagtgtcaccacagggtccttataagaggaggcctggctgagtgtggtggctgatgcctgtaatcccagcactttgggaggccaaggcaggcagatcacttgaggccagtagttctagaccagcctgaccactatgatgaaaccccatctctactagaaatacaaaaattagccaggcgtggtggtgtgcacctgtaatcccagctacctgggaggctgaggcacgagaattgcttaaacccgggaggtagaggttgcagtgacctgagattttgccactgcactccagccccggcgataggagtgagactccttctcgaaaaaaattaaaaaataaaaaataaaaattgaaacaatgatgatgttatgagcaatagaatgcccttagcctgtgcatggcaacatcacgagtggcacggtgacctggtgtccccgccccgtggagatgtcattgacacaatcagatctcgggtcctacgggcgacatcactgttctccttatgatgccatcaaggtgttaggatgggagggcccgcacctggactgcttacagcaggagaatgctcccaggcacccgtctccagagtcctgcctcagtttccctcctccccccttacagagtttggcgtcaagctgggcagtcagatcttcatcaagcacattacagattcgggcctggctgcccggcaccgtgggctgcaggaaggagatctcattctacaggtgaggccgggcttcttgtcctgagagcagggagacaaggcagggttggggcgggcagtcccacggagtcatacagcaaggacagcagaactgggccccaaagcatttaccttcagtgttgttgcttgtatctcaaaggttgcagatggccaggcataaaaccccctttttccccagctactactaatccacagccaaatgtcggtttctagtatccccatggggttgtctgtttctaataccctctagctttgatgtgcatcagagactcatgtgggcagctgactcctggacctaccctaggtgactggatgctaatgacccagtcaccaggtttaggggagctgccctgccctaaaggatggtatctttctggattcttcccctgaaagtctgtttctagtgactcctagtgtttgatttccaaattgctttcagctgattatttccagtgtcttcaaaaagttatctgtttctttttttttttttcagacagagtctcgctctgtcacccaggctggagtgcagtggcgcaatctcggctcactgcaacctccgcctcccaggttcaggtgattctcctgccttagcctcccgagtagctgggattacaggtgcccgccaccacacccagctaatgtttgtatttttagaaaagacgggtttctccatgttggccaggctggtctcgaactcctgacctcaggtgatcccccccgctcggcctcccaacgtgctgggattacaggcgtgcaccaccacaccttgctaattttttgtatttttagtagagacggggtttctccatcttggtcaggctggtctcgaactcccgacctcaggtgatccatccgcctcggcctcccaaagtgctgggattacaggcatgagccaccacacccggccgacattaagttctttctaggaattgtgtgtttctaatctacctctagatgactgttttcttttctcttttcttttctcttctcttttttcttttcttttctttctttttgatatggagtgtcgctctgtcacccaggctggagtgcagtggcgggatcttggctcactgcaacctccacctcccgggttcaagtgattctcctgtctcagtctcctgagtagctgggaccacaggcgcccaccaccacgccctgctaatttttgtatttttagtagagacagggtttcaccatgatggccaggctggtcttgaactcctgacctcaactgatctgtctgcctctgcctcccaaagtgctggcattacaggcgtgagccaccgcgccccactctagatatctgtttctagttatctcccagaagattgtgtgtttctagtatcttttaagtatctgatactccctcttctccagttagagttgtttataatgtcaccctcacatctgttcctagtatcccctgagacatttccacttttggtaagaaaggagagtcaacctgtttctcattttccccagtgtctcccacccctcttagaacattttctgtttctagaattcggtgctcagttcttggtgtggtctccactcacagcaggaatccaattcaacactttccttagggagtggctgtttttagcaacctctgggggaattgtctgtttcaagttcccccacaccaggctgtttctactgtctcccatctctcattaactcacttccgctctttcattcctggtccctttcagatcaacggggtgtctagccagaacctgtcactgaacgacacccggcgactgattgagaagtcagaagggaagctaagcctgctggtgctgagagatcgtgggcagttcctggtgaacattccgcctgctgtcagtgacagcgacagctcgccattggagggtgaggacctagaggttaggacctgggagggggttgaatggatggcagggaaggtgggaagccccaggcagggccaaggaatcaatgagcctggtccctagaggctcagagagtgacaggaacttgctgaaggccacacagcaagtcaagagttcaggggggcgatctcggctcactgggttcaagcgattctctgcctcctgggttcgagcgattctcgtgccttggcctcctgagtagctgggattataggcgtgagccaccgtgcccagctccagagccgaatcttctaactgagcttctgactttggtctagggccctttgtttagaggggtgttgatatacccctctgtaaaatgggtccagtccagaaggcgtgaccatggctgatgagatgtcctctccccctgcagacatctcggacctcgcctcggagctatcgcaggcaccaccatcccacatcccaccaccaccccggcatgctcagcggagccccgaggccagccagaccgactctcccgtgtaagtatcacccatcggccagaatggtgatagggagggagagggaggtgggagggagaggggaacgcgggcgtagctttccaactgggggtaaccttgaggacgcagtcctgtatttctagcatgtgcctcaaaatacctccagcctctacccattacccagttccaaagccgtgtccgcatttgtaggtgttggttacagcagcaccccacttcttagtatcaaactctgccttaggccaggtgcggtggctcacgcctgtaatctcagcactttgggaggccgaggagggtggatcatctgaggttaggagttcgagaacagcctggccaacgtggtgaaaccctgtctctactaagataccaaaattagcccggcgtggtgccgggtgcctgtaagctcagctacttgggaggctgaggcaggagaatcacttgaacccaggaaatggaggttgcagtgagccgagatcgtgtcattacactgcagcctaggcaaccagagcaaaactctgtcttaaaaaaaaaaatttctttttcctctatttatttatttgttttgagactgagtcatgtgagactggctaattttcatatttttggtagagatggggtctgtattgcccagctatgttgcccaggctggtcttgaactcctgggctcaagcatttggcctgcctcagcctcccaaagtgctggtattacaggcgtgagccaccacgcccagcccagataaattaaaattatttttattttgtttatttatttatttatttttttggagacaaggtctcactctgtcgcccaggctggagtgcagtggcatgatcttggctcactgcaacctctgcctcccgggttcaagcaattctcctgccttagcctcctgagtagctgggattacaggcgcccaccatcatgcccggctaatttttgtatttttggagagacggggtttaacctcgttggccaggctggtcttgaaatcctgacctcaggtgatctgcccacctcgacctcccaaaatgctaggattacaggcatgaaccaccgtgcccggcctaaaattctttttaaaatggccccttgaaatccatccctgcctcactcccaatctgttccccaccagggagagtccccggcttcggcgggaaagttcagtagattccagaaccatctcggaaccagatgagcaacggtcaggtgggtggtgactctgagcacccctgtccctgacatttctgatccctgacagcaaggctgtgccaggcagagctgggggaggttggcctgagcctaagtggtgagacatggtttcctgagaaggactcgaggtgggtgacagtccttccaggatgaggacataaagcaaaggtttggaggctggactgagccagtgtgcttgggaaagagactggcttttccctttcagagttgcccagggaaagcagctatgacatctacagagtgcccagcagtcagagcatggaggatcgtgggtatgtaccccagaagaaagcaaacccgctcaaaactcctacatcccaggctgcctccctcatcagcgcaatcctgcctgcttgtatccattgtgttgagtgggaccattaagtgggggttttggggaaactgaggcctggagggggtgggggctttcccaaggacaatgctgagccctccctttgtccgcccactctgctctgaccccatctctgcctccccttgcaggtacagccccgacacgcgtgtggtccgcttcctcaagggcaagagcatcgggctgcggctggcagggggcaatgacgtgggcatcttcgtgtccggggtgcaggcgggcagcccggccgacgggcagggcatccaggagggagatcagattctgcaggtgctccgggggcggctggccagccccactgatcatgggcgtgcagtgtgctaggtcctgcccttgtctgttccagtcctccccttgggtccacctggggactgtcgagaccccagatgggtatttgaacatttcagtgtctccttggctgtgtcatgattttgctgatgtcacgaccttatcttccaggtcatgacctcatcgtccagttacaacctccttttctgtgccttgaccttatctgggttcattttttgttgttgttgtttttgagatggagttttggtcttgttgcccaggctggagtgcaatggtgtgatcttggctcaccgcaacctctgcctcccaggttcaagcaattcttctgcctcacctcctgagtagctgggattacagttgtccaccaccacgcccggctaatttttatatttttagtagagatgagggtttcgccatgttggccaggctggtctcaaactcctgacctcaggtgatccacctgcctcggcttcccaagtagctgagattacaggcatgagccactgcgcctggctaactttttttttttttttttttgagatagagtcttgctctgtcacccaggctggagtgcgggggtgtgatcttggctcactgcaacctccgcctcccgggttcaagggatcatcctgactcagcctcccaagtagctgggatcacaggtggccgccaccatgcccagctaatttttgtgtttttagtagagacagggtttcaccatgttggccaggctggtcttgaactcctggcctcaagtgatgcacccgcctcagcctcccaaagtgctgagattataagcttgagacactgtgctcaagattgggaacaacaatcttgttgttcatgtcatatgacattgttcatgtgacattcttgttatcaatgtcacaatctccttgttatcaatgtcaggactttgggtcacagcctcattgcctatgtcatgaccttgtctgggtcgcaatcctcttgttcctgacattggctgtgttgaccgtgtcatgaccgtcttgtatgtcctaatcgtgtggtcaggtcacagatcattctctcatgatctccatgtccacttatagtcattttctgtgccaccatcccctgtgtctgtgttgtgaccttgcctgtgtcctgccttcatgacagtgtcataactacctccaggatccacagcccctcatcatccccccatctctgtccttgcctcatctcatccccaggctgtctcccctgtcccttgcgcgagttcactcaccaagtctcacccccactttgctctcatgaccttgcttgtgtcttgaccttgcagtgtgagttgtgattcatgatggagtcacagctccccactttccatgtcataagcccactggctgggtgaaaacttgatgccaaattgcctgagggtcatggtattttttactgtatttctactcattttgcttgtgggattctaaccttgacatccacgtcatgaccccgagagtaggtgtctgtgcccacaagctgtgcaagtatattgctgtccctgttatgaccctgagagcaggtggctgtgtctgtatattgctgtccatgtcgtgaccctgagagcaggtggctgtatattgctgtccatgtcatgacccggagagcaggtggctgtatattgctgtccatgtcatgaccctgagagcaggtggctgtgtctgtatattgctgtccatgtcatgacccggagagcagatggctgtgtccatatattgttgtccctgtcatgaccctggtggtaggcatctgtgacccactgtgtgtccatatatcgttgtccctgtcacgaccctgtgactactgtgactacgtctgagttcttttgagcatttcacacagtttccatcgagctccatgccatgacctctgttcccatgttttgatattgacaacccaccatgatttggttatctgaggacaagtgcagtgcctgtgcccgtttctgtgtcaaaactcttgtatccttacaatgccaccagctgtctgtgtcacacatcacacagccatagggtgataccccagtcggaaagccctcggggaactgccgggtcccttggcagcagctctggaagcagctggggctgagttttgcccagaggaaggtccaggatctcatgcacgcccaagaggtaccagagctttttctatagctgcacttgctttctggcaggtgaatgacgtgccattccagaacctgacacgggaggaggcagtgcagttcctgctggggctgccaccaggcgaggagatggagctggtgacgcagaggaagcaggacagtgagtgcgcgtggatatgggtgtgcctgtgtgttgcggggggaggacctggctgtgtggcctggtggtgagtgcagggatgtggttgaatctgcatctctgcaccctccatccctctccctggcccctacagggagagtgccccaaatctccagccaggcccactctcgggtggggagggctcagatcaggcagcagcccaggcagctcatgtggcctcccgctctccccagttttctggaaaatggtgcagtcccgcgtgggtgactccttctacatccgcactcactttgagctggagcccagtccaccgtctggcctgggcttcacccgtggcgacgtcttccacgtgctggacacgctgcaccccggccccgggcagagccacgcacgaggaggccactggctggcggtgcgcatgggtcgtgacctgcgggagcaagagcggggcatcattcccaaccagagcaggtggggactgtgtgctcctgcagtggggcacttctgcttcagcctcagtctccccgttagaaatgggctcgattgggctggacgcggtggctcaggcctgtaatcctggcactttgggaggctgaagtgggcagatcatgaggtcaagagatcgagaccatcctgggcaacatggtgaaacctcgtctctactaaaaatacaaaaattagctgggcgtggtggcacatgcctataatcccagcttcttgggaggctgaggcaggagaatcgcttgaacctgggaggcagaggttacagtgagccgagatcacgccactgcactccagcctggcaacagagtgagactcttgtctcaataaataaataaataggcatgatatcactgcttagcagtgttggtggttcaatctgaggaggtccacaaaaggctctgggcgggccccatttggtgctggtatgagcttcctgttgttgctgtaacagatgcccagaaacttagtggctttaaacaacacacacatcctcttacagttctggagagcaaaagtactaaagtcaaggtatgggcaggcctgggccctcccagaggctccaggagaaaaccaattttccacctttcccagagtctagaggggccgcatccctcagctcggggccccttcctcccccttcatagccacagcacagcctcttctagtctctctctgactctcaccctcccgcctcttcttgtgaggaccctgtgaggacatcgggtcccctgggtcacccaggatcatcatccacctcaatagcatcagtttaatcccatctgcaggccaggcacggtggctcacgcctgtaatcccagcactttgggaggctgaggcgggcagatcacgaggtcaagagattgagactatcctggccaacatggtgaaaccccatccctactaaaaatacaaaaattagctgggcgtggtggtgcatacctgtaatcccagctacttgggaggctgaggcatgagaatcgcttgaacctgggaggcggaggttgcagtgagcagagattgcaccgctgcactccaacctggcgacggagcgagactctatctcaaaaaagtaaataaataaataataaagattagctgggcgtggtggcgggcacctgtaatcccagctatttgggaaagtgaggcaggagaatcgcctgaacccaggaggcagaggttgtaacgagtccagcctgagtgacagagcaagactttgtctcaaaaaacccaaaataataataatagtaataataatcccatctgcagagtcccttttgccatacaaagtggcctgtccacaggctccgaggggtaggacgaggacgtctttggggccaccatgctgctgaccccagtgctcagtactgtcccctcttctccccagggcggagcagctggccagcctggaagctgcccagagggccgtgggagtcgggcccggctcctccgcgggctccaatgctcgggccgagttctggcggctgcggggtcttcgtcgaggagccaagaagaccactcagcggagccgtgaggacctctcagctctgacccgacagggccgctacccgccctacgaacgagtggtgttgcgagaaggtggggcccggagctggaggggccctggggaggcctcacacacagctcctggtgcacctgttcactaacattcagcctctaaaaggcacagtcttggcccggcgtggtggctcacgcctataatcccaacactttgggaggccgaggtaggaggatcgctgaggccaggagttccagatcaacctgggcggtaaagcaagactacatctctacctcaaatttatttatttatttatttttgtttttatttttatttttagacagagtcttgctctgtcttaggctggagtgcaatagcgtgatctgagctcactgcaacccctgcctccctgattcaagcgattctcttgcctcagcctcccaagtaaccgggattacaggcgcccatcaccccgcccccagctaatttttgtatttttagtaaagacggggtttcaccatgttggccaggctggtcttgaactcgtgacctcacgatccacccgcttcagcctcccaaaatgctgagattacaggcgtgagccaccacgcccggcctctacatcaaatttaaaaagatagctgggcatggtggtgcatacctatagtccccgctgcttgggaagctgaggcaggaagattgcttgagcttgggaggtcgaggttgcagtgagctatgatcgcaccagcctggcccacatggtgaaatcccatctctactaaaagtacaaaaaattagctgggcatggtggcaggcgcctgtaatcccagctacttgggaggctgaggcaggagaatcacttgaacccgggaggcagaggttgcagtgagctatgatcgcaccactgcactccaccctgggccacagattgacactgtcttcaaaagaaaaaaaaaaaaaagcatgtttctaaccactctccttctatcaaaaatacttttgggcctgggtgcggtggctcacgcccgtaatctcaatggtttgggaggctgaggcaggtggatcacctgaggtcaggagctctagaccagcctggcccacatggtgaaatcccatctctactaaaagtacaaaaaattagctgggcatggtggcaggtgcctataatcccagctacttgggaggctgaggcaggagaatcacttgaacccgggaggcagaggttgcagtgagcggagatcacaccactgcactccagcctgggcaacaagagcaaaactccgtctcaaaaaaaacaaaaaaacaaaaaaattttgggttattttaggggacagaaggacaggaagggggttcattccttaaaaatctatttgtgtctccaacagaaatatggtgcaaggcatgtagatagccttacaaaaggaaaaagaaatagcaataataataattttaataatttatcttctttgaccgggcgtggtggctcacgcttgtaatcccagcactttgggaggccaagatgggtgggtcacttgagcccaggagtctgggaccagcctggacagcaaagtgagactctgtctctacaaaataaaaaataaattagccaggtgtggtggtacgccagtagtcccagctacttggcaggctgaggtgggaggatcccttgagcccaggaggtcgaggctgcggagagctatgatcatgctgctgcactctagcctgggcaacaaagccagactctggggggaaaaatgcctcatcctgatttcaggaagggaagagattaagctcttatcagaggacagggggttaaaaacccaggtgcagcgattttccaaataaaaccacaaaaggggtgggaagagcaaattgcccgggacaggggtgggtggatggaccttgagaaaagcctttgacactgtcatcgcgctgctccaacatccagatgaaaacgtcctagaaatacaaggccacggccaggcgtggtggctcacgcctgtaatcccagcactttgggaggccgaggtgtaatcccagcactttgggaggtgggtggatcacctgagttcgggagttcgagaccagcctggccaacgtggtgaaaccccgtctctactgaaaatacaaaaattagccgggcgtggtggtgggcgcctctaatcccagctactcaggaagctgaggcaggagaatcacttggacctgggagatggaggttgcagtgagccaagattaagccactgcaccgccagcctcggtgacacagcaagactctgtctcaaaaaaataagtaaataggccacgtgcggtggctcacgcctgtaatcccagcactttgggaggccgaggcgggcggatcacgaggtcaggagttcgagatcagcttgaccaacatggtgaaacccagtttctactaaaaatacaaaaattagccaggcatggtggcgcacgcctgtaatcccagctactcaggaggctaaggcaggagaactgcatgaacctggaaggtgaaggttgcagtgagccaagattgcgccactgcactccagcctgggccacagagctagactccatctcaaaaaaaaaagtaaataaaataaaagaaagaaagggagaaagagaaggattaagttgcaaagaccctgggctaccacttttctcccctcaagacgcttctgtgactgtttcttcagtggtaaaatggtgtatctggtaggccaggtgtcaacatacttttcctgcaaaggatcacatagtaactattttaggctttgtgggctagtctctggcagaactactcagctctgctcaaaggtagccatagacaggacataaagaaatggttgtgactgtgttttgataaaactttattgacgaacacatgcagtgggccagatgtggccctcaggttgtagtctgctgacctatgagttagctaggttcaactgctaaaaagagaccctacagccaggaagaaagggaatgaaggcaggagaggggcttattcctgcccttgaaggcggaacccagaaatgtacacatcaattctgctagtgttccattggccattatttggtcataaggctaacctagctgcaaaggacactgggagatgtagtatttggctgggtagctatggtcctggttaaataggctgtttactataaggaagtggaggggtttgtacaacacactagcagtctttgatcgcaaatgggaccctgattctttcactgtgtctctacccctcagccagtttcaagcgcccggtagtgatcctgggacccgtggccgacattgctatgcagaagttgactgctgagatgcctgaccagtttgaaatcgcaggtgagaagccagatcctctggaaacctcgttggtgaaatagtttcacaactgtttttttgtggggggtcgggggagagttagaataatgatggcaaacatgaagcagatgggccaccagtgccccccccaatacccaagccagacatcctcaatccatcttggcaccgtttgtctggatagaacctccaaatccttcttaacacagttcaccaggtagccattgccaattgaggcaaagtgccacctgttatttgtttaagagaaatttattgatcttctgagacagcagtgaacacgacaggcaaggtcccttggagaagactccaaattaacaactgtagaaacaatggccgggtgcggtggctcatgcctgtaatcccagcactttgggagtccgaggcgggtggatcacgaggtcaagagattgagaccatcctggctaacatggtgaaaccccgtctctactaaaaatacaaaaattagctaggtgtggtggcgcgtacctgtagtcccagctactcgggaggctgaggcaggagaattgcttgaacccgtgaggcagaggttgcagtgagccgaggtcatgccactgcactccagcctgacgacggaatgagactctgtcaaaaaaaaaaaaaacaaaaacaattaagatagactaggaggccgggcgcagtggtcaggagttcgagaccagcctggccaacatggtgaaaccacatctctactaaaaacacaaaaaattagctggacatggtggcgcatgcctgtaatcccagctactcaggaagctgaggcaggagaattgcttgatcccaggaggcggagggtgcagtgagcagagatcacgccactgcgctccagcctgggtgacagagggagaccctgtctcgaaataaaaaacaaaaaatagttaagattgcaaattttggctgggtgtggtggctcacatgtaaaatctcagcactttgagaggccaaggtgtgaggatgacttgagcctaggagtttgagaccagcctgggcaacacagcaaaatcacgtttctataaaagaaaaaagaatttttttaattaaaaaaagatgcaaattttatgtcttttttttttttttttttttttttttttttgcatcagagtcttgctctgttgcccaggctggagtacagtggcaggatctcgactcaccgcaacctctgcctcccaggttcaagtgatcctcctgccttagccaccctggtagctgggattacaggcacgcgccaccatgcccggctaatttttgtatttttagtggagacaggtttcgccgtttggccaggctggtctcaaacttctgacctcaggtgatctacctgcctcagcctcccaaagtgctgggactacaggcatgagccactgtgcccggccaattttacgtttttaaccacaaaaacaaaaaggggggatgagatcacgtctccctccttgaacccctccatgccaggctatgtctccttcctgaaactttgcacgatccaggagggcttcctggaggaagcagtgctcctctcaggtcctagaagacagataggggcaagagtggagtttcctgtggggtcgtagcctgagcagagccctggagttggaactgagtctgggagagccaggggctgcagctcaggctcagcatcaggcctctgaccctgcaaccctgagcaagtggcctgttgtctctgagcctcagtttccccacctgccacataggccagtaccagccacccactcctcaggaggaggagggggctgaggtcaggaggggatgtgagtgcagtgcctggcacttggccaacatgagtttctgctgctgttaggatttctctccagggcaatggggagccatggtggcttcttgagcaggggaggggcaggtaggcatgaatttgaggggacgggggctgccctcctgaagctgctggtcctctctgccgtccacagagactgtgtccaggaccgacagcccctccaagatcatcaaactagacaccgtgcgggtgattgcagaaaaagtaagccgggtcctgctacgggtcccatttcatggatgggggaaaccgaggcctgggcatccaactgaatgtcctgacctgttctcagcccacaccccacaagtgcagtcttccatagagccccttttggaggctttgtgaggcaggaggcccgagacagacaagggcttctcggagtcaaacagcagccagccctgggcaaaggcagagagactcaagttgaggttttgatgcccaagatgctgcgacctgggctgttaccacccccatccccaacttgctagcctgtggatgtgagaggctggggtccactctgacctcagactcttcatctttctatctttctctctctgtttaccctgctgcaatccccctcaccccaacgtccgccggcctggcccaggacaagcatgcgctcctggatgtgaccccctccgccatcgagcgcctcaactatgtgcagtactaccccattgtggtcttcttcatccccgagagccggccggccctcaaggcactgcgccagtggctggcgcctgcctcccgccgcagcacccgtcgcctctacgcacaagcccagaagctgcgaaaacacagcagccacctcttcacaggttggggggtgggtgtcccagggtaggcgggtgggccccagcctgagtctcctgcacacactgacgtcccctccctgcagccaccatccctctgaatggcacgagtgacacctggtaccaggagctcaaggccatcattcgagagcagcagacgcggcccatctggacggcggaagatcaggtactgccgcggtgtgggtgggtcgggcagggaggccccacagacgctgtgcaggcccagctggggtttggggcctctgtcgggagttagggcttggtcagggatcaggactgtggccagagtcaagatgggacctgagacaagggtgttggactggaacttgggtgagatgagattggaggagctgttttttgttgtttgatttgagatggagtctcatgtcacccaggctggagtacagtggtgtgatctcagcttgctgcaacctccgcctcccgggttcaagtgattctcctgcctcagcctcccgagtagctgggactacaggcgagcgctaccaggcccagctaatttttgtatttttagcagagacgaggtttcaccatgttggccaggctgggctcaaactcctgacctcaggcgatccacctgcctcagcttcccaaagtgctgggattacaggcctgagccaccgcgcccagcctggaggagctgttttgagaatggagtcagtggggcacgggagctcacgcccatggtcccagctactcaggaggctgaggcaggagaatcacttgaacccgggaggcagaggttgcagtgagcagagattgcgccacagcactccagcctggcaacagagactccttctcataaaaaagagagagagaatggagtcttctcttggggctggagtcaaggtttggggctcagcttggatttgggggctgagcctctcaggtgaagggtcaatggatacaacccatcctggagtcaacagagaagcctccactgaggctccaggctccaggctcctcgccttgatttgggaccagagtttgaaggtggggggatgtcgtgggtggcagctggggtcctggccagggccagccgcagcatccacacccaccccacagctggatggctccttggaggacaacctagacctccctcaccacggcctggccgacagctccgctgacctcagctgcgacagccgcgttaacagcgactacgagacggacggcgagggcggcgcgtacacggatggcgagggctacacagacggcgagggggggccctacacggatgtggatgatgagcccccggctccagccctggcccggtcctcggagcccgtgcaggcagatgagtcccagagcccgagggatcgtgggagaatctcggctcatcagggggcccaggtgcgtcggacatggggggcaggcctgggaagggtctccggaggggatgccagcacagagcagacacacactgggagcctgttttctaccaggacgtcaacaaacacggcttccctggtcagactggtttctgggactcagacctggggtagctgagacccacgtggcactgagtaacttgcagcattttttttttttttttttttttgagacgcagtcttgctctgtcgcctaggctggagtgcaatggcgcaatcttggctcactgcaacctccacctcccaggttcaagcgattctcctgcctcagcctcctgagtagttgggattacaggcacctgccaccatgcccggctaatttttgtatttttagtagagacggggtttcaccattggtcaggctggtcttgaactcctgaccttgtaatccacccgccttggcctcccaaagtgctgggattacaggcatgagccactgcacccaggcttttttttttttttttttgagatggagtttcgcttttgttgcccaggctggagtgcgatggcgtgatctcggctcaccacaacctccgcctcccaggttcaaacgattctcctgtctcagcctcctgagtagctaggattacaggcgtgcaccaccatgcctggctgattttgtatttttagtacagacagggtttctccatgttggtcaggctggtctggaactccagcctcggcctcccaaagtgctgggattacaggtgtgagccactgcacccggccttttttttttttttttttttttttttttgagttagagtctcgctctgtcacccaggctggagtgcagtggcacgatctgggctcactgcaacctcggcctcctgtgttcaagcgtttctcctccctcagactcccaggtagctgggattacaggtgagcaccaccatgcccagctaatttttttttttttttaaggtattcttagtagagacagggtttcaccacgctggccaggctggtctccgattcctgacctcaggtgatccacgtcggcctctcagagtgttgggattagaggcgtgagccaccgcacctggcctccagccaacattttaacctctctgtgcacctgtttcctcatctaggacacagggtggatggtatcagacttggtggcacagggcggtggtgagcactcaatgtgctcagcccaagttttggcacatagtagttgcgtgtctttttgaacttgacctatctaatttatatattttattttttaaattttagagatagggtcttgccctgctgcccaggctggagtgcagtagtacaatcatagttcgttgcggcctccaactcctgagctaaagggagcctctcatctcagcctccggagtagctgggaccacaggcgcgcaccaccacccacacccagctaattttttttcattttttgcagagatgtggtcttgctatgttgcccaggctggtctctaactcctgggctcaagtgatcctcctgccttggcatctcaaagtgctgggagtacaggcgtgaaccacagcgcccagctgtagttgggtgtttaacagtaacaaatgtgtatgtagctcttagtgtatatgcctcagcatcttcttccacaccctctctaggtcaatgtaaaaatctatgaatcaatgacatctctgattagagtgattttcctggggttgtgcagtacccaacctgctcaactgtccatggcaggctgcatacggagcagccactgtactaagtcctttacgtacatgaactcatggctgtggccctgtgaggacttgcacagatgagaaacccaattccccttttgctgacaggctaggaggtctcagctaaggccttcccctatcccagcctcagttttctcatttagatttggggatgacctgcagacttgtcacggggttagcaagtgggcagcatggcccgggccaaggtgggggatgggatggaggtggttattgatctcgactcaccatgctctggggggagttttgaagctcctctctccctctcctccaaggtggacagccgccacccccagggacagtggcgacaggacagcatgcggtaagaaccccatattccagattggggccctcaacccttcccttgggactcagactctgcggactcagatctagatccaagctatgccttcatggtgcccctagcctagtggggaagacagagcctgccagagcctctctaagccccatataatcagggccaagggagtaggaatccacttcctgggaggcctaggaaggcttcttgaagggcaggatattgcagctggggctttgagggatgcataggagtttgttaacaaggccctacccatgaatgcccagatgtgcttatctctgcccacacccactgtgcctagcacagccagcctcagtttatggtgagaaagctcacacccttcccacccacagcatctattctatttcctgatccccagaacctatgaacgggaagccctgaagaaaaagtttatgcgagtacatgatgcggagtcctccgatgaagacggctatgactggggtccggccactgacctgtgacctctcgaaggctgccagctggtccgtcctccttctccctccctggggctgggactcagtttcccatacagaacccacaaccttacctccctccgcctggtctttaataaacagagtattttcacagcaccggcttctagtggcttccaggaaggacaaggtcctcggtcccgtagaccctgatccgagactttgccaaatgcataagcttttactgtttttatattaggaaatcatacaggaccaagaaccgctggggtcctggccagccagggcaggcccaggatggggctccggggccatggaggcgaaggcacagtggcaggcaagggatgaggtggtcacaggtacacgggctgctcctggcctgtaaggaggcgatatgtggcagctggcatcgtcttgatatgcacctggggagtggaggcggaacggggctcagggcaggcctgggctcgtgggggacgtgggggcgcccctggccaccacccaccacccgcacacctcgccataggcctcggtgagcagctcgatgatgcgggcgtgtggcgtggccaccacactctgcccattgatctcaatgatgcggtggccgacgcggatgcccccacgctcggcgatgccaccacggaggaggctgcagatctgggggagaaaagagggggacgggaaagaggtgggggctgctcaggggccgtgctcagggccgccctacccccccaccccggggccaggggccggggcctcacgatgccgtcctccacgcagaagcccagctgctcgcgggcgtggggccggtggatgatggcggtggtgacgggagggcagtggacgatgctgagtgtcaccgacgtctgcgacttcgtctcctgtggggcgggggccgttggcctcactcagctgccggacagcctggcaggttgtagccccctctgggcctcagtttaccctctcataaaccagagacctggagtccaggggctcaattctggaagaccccctcagatgtgatagagaacagactcgggcccggtgggcatggggtcgaagctgtctgacccgagccatatcgcttccttatggccaaaagccaagccgacagccgggctctccaggcaggctgcaaacatctgtaagaggctgcacggactgtggcctcattcctctgacgggggcaggtccctccctatctctgggcctcagtttccccatctgagcaacaaaggttgagactcaaaaacatggccaggtgcagtggctcacacctgtaatcccagcactgtgggaggccgaggcaggtggatcacttgaggccaggagctcaagaccagcctggccaaccaacatagtgagactccatctctacaaaaaataaaacaataaactgggcgtggtggtgcacacctgtggtcccagctactcgggaggctgaggaaggagatttgcttgagcccagaaggtcaaggctgcaatgagccaggtgcaccgctgcactccagcctgggcaagagtgagaccttgtctcaaacaaacaaacccccccagaaattagctgtttcttgttagagagagagagtggcccagccctggagctgggccacccgcatttccatcctggctctggtactagggaggtgccctggacaagtggcctcccttctccaggcctcagtttccccaagggcacaccagtgggcaggacttaaaagttcgactttgtccctcctggctgggctggagagacctggccagggaggagacctctctgggactcagctccccttcctgggagtgtgggggccctgccacaccaggaaactcacgcggacagcggcctggcacgcagccaggggcagccccaccaggctggtcccgttgatggcggtcaggcggtccccgatgctgagggcccccgagcgctcagcaggccccccgtgcagcaggttggcgatgacggctgtgggcagcagggagccccagcccgactccaccagggccacgcccaggccctcccctcgccgcttctcgaggtgcacctgggacacacagggggcgcggaggctgctcagcagggcccggtgcaggtgcacgggtgtggggggcaccaggtgggggctgcccagcacctcactcacctcccggcagttgtcactgttggagaagtggtccaggtccccattatggaggtggcaggcgcctgggctcgggtgcacgcccacctggctggggtcaataccgctttcccgtaggaactggctgtaggcggcggcgaaggcctggccaatggcctgggcgatgagctgggcctgcggggaggagtggcgcgtccctggggtgtcccacccacctcctccaggtccccaaagtccccagggtcctcagagctgagccctcctgtccccacctggggtgagagtcccaggacacagccttctgccctggggctttgggggaggtggagagacagccgcatcttggggaatctacggggagaaggaaggggaggggcagccctgggctggggggacgatgagggaggcagctccctgcgcatgggctgtgggaaaagctatcaaagacccagccagggggcctggggcctcatgggtggcagggacagcccaggagcgggcaaggtttcggggagtcggccgagagtcttggagtcttataggaggctggacgcggtggctcacgcctgtaattgcagcactttgggaggctgaggtgggtggatcgcttgagcccaggagtttgagaccgtgttcacctgggcaacagagcgagaccgtgtctctataaaaaatacaaaaattagccaggcatggtgataccccggtggtcccagctactagagaggctgaagtgggaggatcgcttgagcctggaaggttgaggctgcagtgaactatgattgcgccactgcactccagcctgggtgacagaaggagaccttgtcccaaaaaaagaatttaaaaataagcttatgggagggaggttaaatgcacggcccactgagggaggcgacagttgcagtgaggagggcctcaggagggtggccccgcgccctggctgctcacgtcctccgcgtagaatacgtggcagagcatcttgtagaggcggcggccgtggtcctggggtgccggcctccgtgccagccgccgccgcgccatcagcaccagcacgcagccgatgtcggctgtgtaggagatggtatgcagggcgtggtccatcatggcctcctggggcgggagaggcagcctgggtgggttggggggccgtgccaggctcgatcaccccacccgcatccctggggcgggtccctgccccgtacctgggagtccgctgtcaagaccttgatcctcttggtggagacgaacaggtccacctccgtcatgggctgggtctccccatcgggggcctgtgggtggcggcgtgggaggtggaggcccccacagacccagcctgcagcccacccgcctgcccgcccggccccggccgccccctcaccttgacgcggtccatggcctcccgggcctgggccatgcgcgtgctggtgggcgggttccgttccgacaccagctgggtggaccccaggtacctggccccaaatatgacaccgtccaggaggtcttcatggtcacagggaccaggcactgagggcgacagcgaagagggtcggcccccaggggcccactcccacaggctctgccccagggctacgctctccgagatggccgggagacacagtgttctagctggtggcttagcactctccagccaggaagcacagcccactgttctagaaccatccaagcagcctggccctcacaggtctagaaccttctgtccatccctcaaggactcgcaggtgggaaaccagtgagtccaggccatggctggattcaaagccagatctagcacccacagataccttcaccccgtgtccccagaattccatgatcaggccggaaccagacagtcccactcctgcttttttgagacacggtctcgctctgtcgcccaggctggagctcggtggtgtgatctcagctcactgcaacctccgcttcctgggttcaaacgattctcctgcctcagtctcatgagtagctgggattacaggcgcccaccaccacgcctggctagtttttgtatttttagtagagacggggtttcgccacgttggccaggctggtctcaaactcccgacctcaagtgatccacccgccttggcctcctaaagtactgggatgacaggcgtgagccacgacgctccaccccccactccaatttcgaaacctccacaacattctagaaccacagtggacccctgcttcttggttctggaattccctccatcaatctagaactggccagctctgcccactgttctagaaccgtctgcagtcagcccaggatagcaggcagctctgttcccgggttgtagaaccactcagaacagagacagaccctgctgcctgtctaaaattcccatactctccagaaccccagctggttctgacccttgattccagaactctctgacaggtctcatagcaattctgtcaggagttttagaatcttattatcactctagaatcagacttctctgctccgtgattccagaacatcttaatcacaatcgcgtcaggcagctcttcctgtggttctagaatctccttcagtagttcacacctttggctacaccagggattctaagaattacctgaccagtcaaggaacaaacaattctgttccaggagaattctagacagttccagaatactcccaacccagcccagaactacataaagctttactcctggctgggtgcggtggctcacgtctgtaaccccagcactttaggaggccggggggggggggtggatcacctgaggtcaggagttcgagacctgcctggccaacatggcgaaaccccgtctctactaaaaatacaaaattagctgggcgtggtggcgcgtgcctataatcccagctacttgaaagctgaggcgggagaatcacttgaacccaggaggtggaggttgcagtgagccgagagagatcgcaccactgcacaccagcctgggtgacagagcaagattccatctccaaaaacaaaaaggaaaaaaaaaaaaaagctttactctcatggttctagaattccctgagctacccagagccagacagctctgccagtggccctagaacattctaaccagtaactacggctctttggtttagaaccacgggtgtagggccccgttctggacaccactaagtgaaattcaccctacaccacagtcggttctgcccactatccttcaggatctaagcattctggaacaagagctccactctggggttctagagagatacgtcattcactgtggtagccaccaggcacatgtatctatcacagacttgaaatgtggctcgactgaatagagatgtaaatagaaaatacacactagatattgaagatttggtatgaaaaaaagtaatttaaggtcaggcatggtggttcacgcctgtaatcccagcactttgggaggcagaggcgggcggatcacctgaggtcaggagtttgagaccagcctggccaacatggtgaaaccccgtctctactaaaaataccaaaattagctgggcatggtggcaggcgcctgtaatcccagctactcgggaggctaaggaaggagaatcacttgaacccaggaggcagaggttgcagtgagccaagattgcgccattgcactccagcctgggcaacaaggtgagactgtgtctcaaaaaaataaaaaagtaaattaaaaatattgattgtatgttgaaataatattttaaatatgttagcttaattaaaatgttattaaagttaatttcttagccaggtatggtggcgtatgcctatagttccagttactcaggaggctgaggcgagagaatcgcttgaagctgggaggcggaggttgcggtgagctgagatcgtgccactgcactgcagcctgggcgacagagcgagactccgtctcagtttaaaaaaaaaaaaagttatttcacctgtttttaattttttaacgtggataactacaaaattttaaatcacatatggctcacgttgtatttctattgtagttccatctagaactttctgattacactataattggacagctctgcccagggttatagaacactagataactattccctccatggttctagaattctccagtctgagtagaaccagatgcctctgttcaccaattctgagcattctcatcagcccagattcctttaccctagaaacagacaaaatgccaagccctggaactccctaggtgtcacagctctgctcgattctagaaccttcttagagctataggttcaaaccagtttttctctctgcaaccacagaactgtttttttttttcttttttttgagacatggtctcactgtcacccaggctggagtgcagtggcacaatcttagctcactgcagcctcaagtgatcctcccacctcagcctcccaagtagctgggattatagacccatgccacgtgcctggctaattttggggggggattttatttttgtggagacagggttttgctgtgtggcccaggctggtctcgaactcctgggctcaagcgatcctcccacatcagcctttcaaagtgttgggattacagatgtgagccacccttcccggccagaacttactatctgacctatatccttagcgaagtgtagaacagaggctggccgcggtggctcacacctgtaatcccagcattttgggaggccgaggcgggtggatcacaaggtcaggagtttgagaccagcctgaccaagacggtgaaacgccgtctctactaaaaatataaaaattagctgggcacggtggcggacgcttgtaatctcagctactcaggaggctgaagcaggagaatcacttgaatccgggcggcagaggttgaagtgagctgagattgcaccactgaaaaaaaaagtctagaacattccagagggccagaaattgttcttcccatgcttttagggcagggcttggcaaacattttctgtaaagggccaaagagtaaatattttcagccttgtaggtcacaaggtatctgctgcagctactcacctctgccattcgaacatcagagcagccatggacaacacatgaataaccaagcatgatgtgtaccaataaaactttatttatgtacactgaaatttgtttttctttttttagagacagagtctcactctattgcccaggctggagtgcaatggcgtgatctcagctcaccgcaacctccgcctcccgggttcatgtgattctcctgcctcagcctcctgagtagctgggattacaggcgtgcactaccatgcccggctaatttttgtatgtttagtagagacggggtttcaccaatgttggccaggctggtctcgaactcctgacctagtgatctgcccaccttggcctcccaaagtgctgggattataggcgtgagccaccgcgcccagcttatgcacactgaaatttgaattgcatttttttatttttgagacagagtctcgctctgttgcctaggctgtagtgcagtggcgtggggtgatctcagctcaccgcagtctcgacctcctgggctcaagaacttctcccgcctcaacctcctgagtagctgggactacaggcatgcaccgccacacctggctaactttaaacattttttgtagagatggggtcttgctacgttgcccaggctggtctccaactcccggctcaagcgatcctcctgcctcagcctcccaaagagctgggattacacgtgtgagccaccatatccagcctagcatatcattttcacatgtcaagaaatagtattctttggccaggcgtggtggctcacgcttgtaatcctagcactttaggaggccaaggcgggcggatcacaaggtcaggagttcaacaccagcctggccaacacagtgaaaccccatctctactaaaaatacaaaaattagctgggcgtggtggcgagcacctgtaatcccagctacttgggaggctgaggcaggagaatcacttgaacccgggaggcggaagttgcagtgagccgggatcacgccactgcactccaagcctgggtgacagactctgtctcaaaaagaaagaaagaaatagtattcttctttcaatgaaaaaaaaagtcaattaaaaatgcaaaggacacccgggcatggtggctcacgcctgtaatctcagtactctgggaggctgaggcaggcagatcgcttgagctcaggagtttgaaaccagcttgggcaacatggtgaaaccccatctctacccaaataaatacgaaataaaattagctgggcgtggtggcacgcacctgtagtctcagctatttgggaaactgaggtgggaggatcgcttgaacctgggagatggaggttgcagtgagctgagatcaagccactgcactccagcctggataacagaagtcatcaaaaaaagtaaagaagccccaaacgcaaaaaccatctttaactcgagacctacgtgagcaggcagtgagttgggtctggcccgacgacgatgatttgccaagcccggttctagaacccagtgctgccaatggccggagctgccccacagtccccttctcactctaccccgttctcaaggctggctctcctctccctggccagccggaatctgctcgaaaccaccctcagaggctcccgagaacctcgtccttactggcaagctgttgccaggctggtgagcctgattctggctgtctaggggccttcagtgcctgaggctagggtgggcgggacactcaccctcctggggggcagggtaggaagccagggtctcggggctctggaagaagatagaggaggggcaggactgagtctccctgcttggttccaggcagtccaggatgcctggagggcggggcgggcactacctgggcaccagcgggtggctcttcaggtgtgactagaggcaccgtctccagccagggttccggggaactgcttgagctcctgctgccctcctgctcagcagaggccccctccacccattctggggagtcagaatcctcatctgggtcctcagggggctgcaacagtcggggggcaggctctagaggctcttcaggaccagtctgggaaggcgggcattcctcgcagtgcaagaggcccagcaggtcatcccggccagcttcggcagacaggagcccgtgggcatcagcaatctcctgggaggccaggccatggcctgtggcaatgtgtaggggacagggggctccacctggggatgggcccaccagatcgcctggcagagcttcaaactgctgcaccagctcctgaaggcttgactcatcaagttccatccgactgaggctgccggggcctcctggcatagggtcccactggctgtcaggggtgaggtcctccgaaggcacaagaatgtccctgggcccctccaagtccatggctggaggccccgaaggggatcgggaaattgtggggaagtccatgcctggactccaggcttaggccggcatcttcaggcagctgaaagagagagagtcagcactgaggtttcgcccgggtgcagtggctcatgcctgtaatcccagaattttgggaggcccagaagggctgactgaacccaggagttcaagatcagcctgggcaacagagcaagaccctctctctacaaaaaatacaaaaaattaaggccgggcacagtggctcacgcctgtaattcccagcactttgtgaggccgaggcgggcagatcatggggtcaggagtttgagaccagcctgactaacatggtgaaattccgtctctactaaaaatacaaaaaattagccaggtgtggtggcaggcacctgtaatcccagctacgcaagaggctgaggcaggagaatcgcctgaacccgggaggcggaggttgcagtgagctgagatcgcgccattgcactccaaggtgggcgacagacgagactatctccaaaaaaaaaaaaaaaaactagctaggggtggtggtgtaggctgtagtcccagctacttgggaggctgaggtgggaggatcacctgaaccaggggaggcagaggctgcagtgagccttgattgtgccactgcactccagcctgggtgacagagtgaggccctgtcttaaaaaaaacaaacaaacccgaaaaacaaaaaacttgaggtttcccggctgcctatccggtgctaggctctagctgggtactgttcatacagggcacataatttaatacccactaacccttgcaaggaagttaggattcccattttacagatgaagaaactgagccacagaatggggaggtgtgaggcagtggcttcccgagcccctgtgtcatcccagacctctctcaactaatggagtctgttcactccagccctggttcttccaggtcctcctccctcaagacgcggaacccaggctggagacccagacctcacaccctgactctaccgactggtcagaggcagttccccaagaccccagacccaagaccccagtcccatgacctcaacccccaatacctccatccagaactttagacccaggaccctggacttaataccagagacccaagacgccataaggcggaccccagtctccaaacctccaatgctaccccaagatcgactccagactcagaccccgacttcaggacccagccccaagcccagaccctagtcccccctcagaccgaagacctcaagcgccgactcagactgcgctctgcacctcgaggacactcacttcccaaatcgaggccgcctcagccccgcgcagcctccaggaccccgctccccacggacggccccgacgtagcccgggccgcgtccccagaaggcgcagctcggggattcccggtcccggcgcccgctcctctatccgcgcagagccctggcccattgagcatgcgcggcctcgcgaggcctgctgggaaatgtagttctcccacccagcctcgccacgcgggggcgctgggacaactgcagatgttggaggggagttcgaatcccaggcttcccggcccgcagactgccccggctggccccaggacctgtttgttctcctgcaaaatagggttaataatcactgcctggctctgggggctgtgttcattattccaaaggatggcagatggggagaagtggggttgggaaatattaaagaagtgtgagaggtggtttccttgggaccttgaggcaccggaagcgtcgtggagaccctgttaaagacggactttcggtttggctcacagtagggagacacataggtgcaccatggatttggggtcggcctgggaactttacctccctgagaactcagtttcctcattataagctggggaaaaaatagtacctacctctcaattgtgaggattaaattagatcaagcgggttaaggatttagcagtagtagagctggaaaagaatatataaaatatatattattaatttatatattatatataaaacatactatatattatatgtattatatatgttatatataattttaaaaatataatgttataaaaattaacagtgattagactccagccctactggagtatattagactcattgttaatcttctttttttaactttaaagctttgaataattactcattggatggaatcaggaacatataaagtgtgatatttttagtaaatgttatgtaattgaagaagggcaagaagtcaatgaaatatcccttgaacgcctcctcctatagtaactgtgtatgtctacaaaagtctgaagaaatcaccatagattatgaaagcttgggagaccgcatttcccagacacctccacggggcctacacttccacggggcctacaactcccaaacacccttgggccactgacgtcttccggaaacgtgcacttgcaagctgcccgcaatacgtcatggcgaccaaacgccttttcggggctacccggacgtgggccggctggggggcctgggagctcctaaaccccgccacttccggaagactcctggcccgggattatgccaagaaaccaggtgagctgggttaagaggaaccaaatggggacggtgggtgcactgaggaattgacagtgcgcaggcggtggttggggaggtggtgctagaactgatgcgcaagcgcagagaggcggatgccaggctgtatgcgcaggcgcagtttgagggacccagcgccgcttggagctcgggcgtctggctcggagatactgtagcgattggacccagggcgcaggcgccagcttggggcggagcggcctgggaggaggatgtggttacgtggagaccacgcgtttcactgcgcaggcgcgggttggaaaggatttgaagggagtctggggaggtcatgaacttgggttccagttctgtttctctgcctgcctccaaatcgctgggtaaccttggccaagacgttaccaaacattcaaagaaattatggagcccgtttaattggccacttcagcaagaacaaaacaaggttattaaggtttagctggatacagccttgcctgatctcctttgttgaaagggggaaattgtccaatgttcggccttaaagacagacacatagcagacaaaatataacttgaatgacttggtcattccaagcatcggtgttacttaatgctatgtccaaatcccacttaaagttacttaatgctgtgtccaaatcccacttaaagtgatttcgaggccaggcatgatggctcacacctttattcccggcactttgggaagccaaggagggaggatcgattgcttgaacccaggagttcgagaccagcctgggcaacatagcaggaccctgtttgtataaaaaaaaaaaaaaattgcctggcgcggtagctcacgcctgtaatcccagcactttgggaggctgatgcaggtggatcacaaggtcaggaattcaagatcagcctgaccaacatggtgaaaccctagctctactaaaaatacaaaaattagtggggcatggtggcacatgtctgtaatcccagctactcaggaggctgaggcaggagaactgcttgaacccaggaggcggaggttgcagtgagccgagatcacgccactgcactccagcctgggcgacacagtgagactctgtctcaaaataaataaataaataaataaaaataaaaataagcggggcatggtggctcacaactgtgatctcagctacttgggaggctgaggcagaaggatcacttgagcctgggagtttgaggctgcagtgagccatgattgtgcccctgccctccagcctgggcttttattttttatttttttattttcttcagacggagtctcgctctgtcgcccaggctggagtgtgcagtggcgcaatcttggctcactgcaagctccgcctcctgggttcacgccattctcctgcctcagcctcccaagtagctgggaccacaggtgcccaccaccatgcccggctaatgtttttgtatttttagtagagatggaatttcaccatgttagccaggatggtctcaacctcctgacctcgtgatccgcccaccttggcctcccaaagagctgggattacaggcgtgagccgccgcgcccggccgggctgtctttattttttaattttttagattttttatttttttgagatggaatcttgctctgtaacctaggctggagtgcagcgatgcgatctcagctcactgcaacctccgcctcccgggttcaagtgattctcctgcctcagcctcccgagtagctgggatcacaggcatatgccaccatgcccagctaatttttttttttgtatttttagtagagacaagttttcaccatgttggccaggctggtcttaaactcacctgacctcaggtgatcttcccacctcggcctcccagagtgctgggattacaggcatgagccactatgcctggctgagaccctgtctttaaaaaaaagttttgagtggccgggcgcggtggctcacgcctgtaatcccaacactttgggaggccaaggtgggcagatcacgaggtcaggagatcgagaccatcctggctaacacggtgaaaccccgtctctactaaaaatacaaaaaattagctgggcgtggtggtgggcgcctgtagtcccagctacttgggaggctgaggcaggagaatggcttgaacccgggaggcggagcttgcagtgagctgagactgcgccactgcactccacctgggcaacagagcgagactccgtctcaaaaaaaaaaaaaaagaaagttttgagtgtagcagagtccagccaggggcagaggccacctgagacagggttctgtgagagaagtttggcttccagaggaggggctgggctgaaatgactctccctctcgtctccccagttatgaagggggccaaatcgggaaaaggtgcagtgaccagcgaggccctcaaggaccccgacgtatgcacagatcctgtccagctcaccacatatgccatgggcgtcaacatctacaaggaagggcaggatgtacccctgaaaccggatgctgagtaccctgaatggtgagtaggccaggctgtgtcatcctgcaatgactattccttcctccgccccaggaggaccccttcccggagaggcggatcgccactccagccggagcctaatagtcacacctacccatcctggctttagggcagggggcttcagggctctgcccatctgtaatggggtgatgggacccatccctccctcagagggctgtgaggaattcatgagattagaacacatgtcaagtacctaaaacaatgctttatcttaagcaaatacttaaaaaaaattttttttcaggctgggcgccgtggctcacacctgtaatcccagcactttgggaggcaaggcgtttggatcacctgaggtcaggagttcgagaccagcctggccaacatggtgaaacctcgtctctactaaaaatataaaaattagccgggtgtggtggcacattcctgtagtcccagttacttgggaggctgaggcacgagaattgcttgagcctgggaggcagaggttgcagtgagctgagatcacgccattgtactccagcctgggcaacagagtgagacttggtctcaaaaaaaaaaaaaaaaatttttttttttcttctatatggagtcttgctctgtcacccagtgtggaatgcagtcatgtggtcttggctcactgcaacctctgcctcctgggttcaagcggttctcctgcctcagccttcagagtagctgggattacaggcatgcgccaccatgcctggctaatttttttttttttttgagatggagttttgctcttgtcgcccaggctggagtgcagtggtgtgatcttggctcactgcaacctccacctcccagtgttccaatgattctcctgcctcagcctcccgagtagctgggattacaggtgcccgccgtcacacccagctaatttttgtatttttagtagagacagggtttcaccatgtttgccaggctagtctcgaactcctgataacctcgtgatccgcctgccctggcctcccaaagtgctgggattacaggcgtgagccaccacgcctggcctaattttgtatttttagtagagacagggtttctccatgttggccaggctggtcttgaactcctgacctcaggtgatccgcccacctcggcctcccaaagtgctgggagtacaggcgtgagccgccgcacccgtcctgcaaatacttattgaccactgactgcatgccaggccctgctctaggcttgagggatacagaagggctcaaaacagacacaagtccccaccctggcggagctagctggggaggcagacaggaaggaggaagtcaggcagctgtggtggtgacacttccaggaagggggcaggagaatgagggacagagccggggtgtttggctgctctagtttgaggtttgggggacacagaagccaagacgggagtgggtggaaggggctttccaggcagtgggcacagcctgtgcaaaggccccggggcaggaccgcacctggtgtgctggaggaacagcggggaggcctgtgtggctggagcacagtgaggagggcgagagagggaggaggtgagggcaggacctgtgggctgcaggaagggttctgctgtggccccaagctgatctgaaggctggggagggtcaggaaggctgagcaagtgggggcaggtggcatgatgtggacagtgctaggaggcaggagagggcttggcgtgtgccagcctcagatgtgccactgggatggggttggctccattgctgcatggccagggacccacccagcccagggtcggggagggaccaccctgagatcatgcagccaaccagtgggcctggcacccagccccgtcgccgcctctgcccgaggtgcccgggacaccagggagcccaggggtcaccgtgtagctctgattcctgcccgcacccccgtcaggctgttcgagatgaacttgggtcccccaaagaccctggaggagctggaccccgagagccgggagtactggcggcggctgcggaaacagaacatctggcgccacaaccggctgagcaagaacaagaggttgtagcatggagggcccggcatcgctgacccccacgccgagggcttgccgttttcccggaggacgtggacttttgtgagacaagaggcggctccccagcctgggtttccatgtgaccccacagtggggctggaccagggccctggaggccaataaagagctttctgggtagaccctatttccccttggtattgtctggtgtcggcctggcgggaagtgggtccctcagaccccagggatcccagcctccaccccagccagtggtgggccgtctgcaggtcccctgtgcctccggcccttggtgggcttctctccccaactcctggaattcctgacactgctcacgaggccccggccccaaatctcaagttgctgggtgagggggttgtcctagctaagccactcttggttgcaagggactcaaacctaactatctcaagccatcagagtcagaaaagaggctttatgagcttcaagaaaggagatgtccggagcgggtagtggtgtggctttaggtgtggctggatccaggtgcttcggtattcagacccaaggctctctccatctcagggtccttggatcccccaggggctggcactcatgggcagggtagcccgagggctcctggccgacgtccccaccagcgcagcaagtagaatcagagggaagggactgccccttccttcctgctgcagtcacagcgtggtcctcactggcctatccctggagcccaggggcttgggccttccttccccacccccaagtcctctgtccactccactggagcccaggtctcaacctccgcccccagtccaccctctggagtcggctttcggcaccctgaccctgacccagggtctgaccctaggcctgagtgaggactggcctccctgcagtcccaacaactcctgccctgcctggctgtgatggggcgggatcacgagggctggagtccaccagattagaggaggctgagggtgacacgtagttagggagtgatggggcctcttgctgggggtagatcacctcatggaccccacgtcctgcagaacccccaagggtcatgccctcggccccacccttgccacagcagccccacccatgcctaggtgggtgccctgggggatttggactgggctcacccaccctccggcttcctctgtccacaagctggatgggcggggcggggcccgtctcagggaaaccctaaccttcatcctcttaggggactctggagtggaggggattactgcgcacctgctgtccccggcggcctccctgggcaggcgggggtgtgagcgcgccttctctcgcgctcactgcaggtggtgccagccgttcccaccctcctgttgttccccaaggttctgagggtaaaaatcaaagttataacagccactggccctgcctggcctccccatcacctccctcctccccctcctcactctgctccagccgcatgggcctcctcgctattctttcaatgcacgaggcgtggtcctgccccagggcctttgcacagcctgtgcctctgcccagctccctccttccctagaccttctccctcccgcccccggtctctaccttcacgccagcctcccctcctccagaactccctattaaaattgcagcccctgccacactccacatctgactttcctggtttttttttctccctatcacttatcactgtctgaagtcttttgttttagatttgttttttatttgtattgagtcagggtctggctctgttgcacaggctggagtgcagcagtgtgatcacagctccctgcagcctcgaccttctgggctcaagtgatcctcttgcctcagcttcttgggtagctgggatgacaggtgtgcaccagtacacccggcacattttaaaaacgtttgtggagatggggtcttgctgtgtcacccaggctggtctcaagcaatcctcccacctcagcctcccaaagcactgggattacaggcatgagccaccgcacctggcctggtttagctttaaaaaaaaaaatctttcttgtgcttactgccgtgtccccactgcctggtgtgcggtgacattgggtgatggcggggcgttggaccacaggactggtgtgtgaggtgccgcctagagatggggtgacctggtgatctgggagtgatctggggagcccaggctggagacggggagggtagctactgcagctcctgccctggtgccgcacttctgtcccgggaggtggcgctggcccagactgtcccatcccatgcctcagggccccctcctgctgcactgggccagccgtgcttgccagtcccagcgggttctcggccccgcgacagcctccttgctcagagctcttgggcgatgcggctgggttggacagagcagatgctggccatgcctccactggggacatgcacagggcctggggtctgtggggacgtgaggaacggtctgacgatgacgacacacccagcatcagcccgcctccacctggaggcccaccagcacctggcccgggacccaccctctctccagaacctgtcgctgtgccccggacggtaggaccggtgatgggtctgaaaggcagctccatccactcctggccgtgcgactttggggacctggcttcctgcctaagccccggtttccctctctatagaatgggctgacagctgtgcccgaggtccagggcacaacggagaggggagtgctcacatggcgagcacacggtgagaggagaccaggctcgcgggagctgctgctatttgttatttccaggggactgggagcctggagagtgggcagctctgctgatggggattaggagaagcagagagatttacactcatcttacagagtcagcggtcccgccacccacagcctcgcagccctcgaacctcggaggcccccacgcccaattaacagacaggagactgaggccccaggaggggaggaggtccccgcacctggcctgagaatacttgggtcacctcctgcctgacactgggggccagtccgctgccagcaggacgggtggcgatggggtgggagacgggatgggggcagggaacccagcagcctgtctctctggtcccgctccccagtggtggtggcctggcctgaccacggttgctccatgacctcggcctaggccaaggcgtggtggctgtcaccagggcacgtccccggttctcgggttgggccgaggagggggcccgggagggcggcaggctcaggctggcggccaggccctgtccagagcctgtgcatgttccttggccagcagccgcagggacgcctcctccagggcgaagccatctgcgaaggtgggagcaaaggcatgaggcccgaaggacgcttgcagccccgggcccgggcccaggaggcgggggaggcctggcacggccggcggtccggggcccaaccagggctccaggggcagcgacatggccggggggcgggcgaacggcagcgctggggcctcggggagtctcggagctgccacggcacccgagcctgactccagccgctcctggcggcgccacttggcccggcggttctggaaccacacctggagggtgcgagagggaaggggggttgctgtgagctcagccgctccccgccaatcctcggaccccctctgcacaccccagccctgggggttctgactcccgtctgacccgactcctacctgctgcttcgctgttctgccccaagaagatgaggatctcccaagcgttccctaagcccaggctcccctccaactcctcactcccctccttggcctcccttggcccttagcaagtaacctgagctgcctaacgtggcattcaaggccttcaaaagcgttgttacccacaccattctctgcctcctccttcacccctggctcaagggaaacgcctccaacttaacccctccatgtctttgcacacactgttcaggatgcctagaaaaactccccttttccttcccagctggcacactcctactcaaatgtcaaaacctcagctcccacaccccctcctccaggaagccttcctagcttctcttctgctgttgctccgggagggtcaggatcttgctttgcctccctccccaggttgcaaaagatgtgtgtgttggggggtgccctcacctgcacgcgcacctcaggtaggtgcaccttggctgccagctcctcacggctgtacacatccgggtagtgagaggcctcgaacgcccgctccagctggtgcagctggtaggtggtgaaggtggtgcggttcctccggtgcttcttcttgggggcctcctcgcccggccccagacccccaccctcggttgccggcccctcgcccgggctcaggaacatggctcccacctggtgggacggcagcgggacagatggtggggagacggctgggggggctaccggcagggacagggcaggggagccccaggcttgcctcccggctccggggaaatcggttccctccactggggccggcatgcgctctgcatccccaggctgtcctcctcgggcttgggggggtctcctgctgtgcctctgtctgctcttccttctctctgtgtgtgtcaccgtccctgttttctcttcccctctctgtgactgtcacggcctgtgtgtgtgtgtgtcggcgggggggggtcaaggatgcccccccgtcaaggaaggcaggatcccttctcacgccctaagccctccaccctgaggggatctctgcccccaccacctcctacccaggcccaccagtgcccaccccgcactcaccgcccacggcagcccctccgtcgatttccacgggacacctgccccagcgggcctggcgctgcgtctgctgtggcctggccctgccggagccgagccaggtcggggctgcgtgggggaggattagctcaaggtgattaattgaggcggcccctcccacttggtcctgggctgttctgagccaggagggagggcagggtggatggagggctggggctctaagtgggtggctggggggatagtcttacaggctccacggccccttgccataagacggcaagggcctctccctctctgggcctcagtttccctggctgtaaaactgccacactaggacctaccctggggggatttcagcttctcagagcatcgcacagaaattggcatacagggggcacttaatgaatgctcactgttaatatttttatctgctgggggcagaaaaaggtgtcttagaactcacagatgtcagaggcagttggggaagctgaggtccagaggtgaaggcactgcagttggttcctctggacacaaggggtagggacccttttagctgggtctggaggtatgaatagacgttcaccattcacagccgggcgcagtggctcacgcctgtaaccccagcactttgggaggctgaggcgggcggatcacctgagatcatgagtttgagaccagcctggccaacatggcaaaaccctgtctactaaaaatacaaaaattagccaggcgtggtggtgggtgcctataactcccagctactcgggaggctgaggcaggagaattgcttgaacctggtggggtggagcttgcagtgagccaaggtcatgccattgcactccagcctgggcaacagagtgaaactccatctcaaaaaaaaaaaaaaacaaaaaaccaaaaccaccaccaacaaaaaagaaaaacagaagttcaccattcaataaacatttattgagcacttactgtgtaccaggtactgctcacagcagtagtgaccaaaacagacagaagtcacggggctgactttctagcagggcagacagacaaccaaccactgtgttaaaatgcagagcgtggccagtggccacgagcctagggagaaaacccacggaggggggcctgtgggggcaaggtgggttgatatttcatttagtttttgggtttttttttgagacagagtcctactctgtcgcccaggctggagtgcagtggcacgatctcagctcactgcaacctccgcctcctgggttcaagcaattctcctgcctcagcctcctgagtagctgggattacagacacctgcaaccacgcctggctaatttttgtattttttagtagagacacggtttcgccaccttggccaggctggtcttgaactcctgacctcgtgatccgcctgccttggcctcccaaagtgctggcattacaggtgtgagctaccccgcctggcctatttttgtttttttgagaaggagtctcactctgttgcctaggctggagtgcagtggtgagatctcggctcactgcaacctccgcctcccaggttcaagtgattctcctgcctcagcctcctgagtagctcggattacaggtgcgccaccacgcccagctaatttttgtatttttactgaagatggggtttcaccgtgttggccaggttgctcttgaactcctgacctcaggtgatccacttgcctcggcctcccatagtgcaggagttccaggcgtgagccaccgcgaccagtcgggttgctatgttaaggaaggtggtgagaatggaagatggagtgcaaagccgcaagttctggacacatggggtgtgaaggatggagtgctggggaaccatgggaggttgtggagcagggacacagtggcattttatacaaacatcaatgatgagcagctgagaaaccaggggcaggtgccaggcaggtgaggctacagggtctagtcaggccaagggccgggggagatggggaggacagaagggtgggggtagcaattccagaggaaggaagctggagaggggcagggtgtgggtatggaggtgcaagggcgttgcccaggcccattctgggctgtgaggtgggactgtttcagaggcagaggcctgagaggtggagcgggctccaggggaagccccagagacgagtgccccccaagtccaaggagccagggggctcaggcaggggagtgccctagagatggaaaggagagggtactccagggacaatgggaaggggagaggaggggaggcctgatttagtgacatggaggacaggggggaggtgactgcggtggagtgagggggagacccaggcctgtggatgggcgaaggggccagtgcaaagtgaactagagatccttccagaatgttggcatgttggctttgaagggagagacacacaaagaaagagagacagagacagagacagagaaaggcgtgacacacacacacacgagaaaccaggtgcccaggccccagagtagtcccggtcggatcccagggggcaggtggcttcggcccaggatctgggtgtagctcccccatcccaggggccaagttcaggtgggcaaggtgcagaggcaaacaggggttcaatccctggccagaggggtggctgcagcttctgaggctccaggtgcctcccctggcctcagctgcccgtcggcaaggtgggcccaccaggctctgtgtccaaggtggagccaggcctgtcacccatcgagggacagggctgtgggctggggagagagaactcccctgatcgcttcatcactttagagcactaacgagctgcttcaggtctcaggccgcaattagctaattggccagtgtgggttaagaggccccaggaaggatcgtggcgtgaggcgcggcggggggggctttgggcgacttagccggacaggcagaagctgcagacgctgtgtcagcttagagggccggattaggagcgcgggctgggtgggcagggccaaggggacaggtggccccctgcagtggattaggcagaggccaggccactccgggcctttccagcctccacctttcaattttccccaagaaagaaccactaacctgcctcaggtgctggtggggagagtgaggcccgagggtgtgcagggctttaagggggccacacaggaggtcggcgtgaccttgggacatttccgtgtctcagctcaggctctgcttggccaggatgggagggtgggctgggagtcctggggtgggggccatacccagcctggccagagacccctctccgtgtatcctaaaggctggctccatgggactcagctgagagcaggtgttggaccgtcccagcaataatggagcaccagctgtatgcctgccttctaggtgcccctcccttcactgctcacacccctctgggaaaaggtgtccattggctggaggaggctgctgaggcccagagagggtaaaagctttcccagtagggaccacctctcccctgtttgcccaggactttccctgttttagcactgaagtctgacaccctggaacagccctcagccctgagcaaaccagggtggtcacaccagggtggtcaccccagggccagcgtcacacagctggggggcgagtcaggattgaacctgtgtgtgcaaagtggatccccggcccgctgtgccagagaggacaggagggccagtgtttccctgccattctgccccccagagtcaatgggtcagcctgctaggtccctggacatttggactgcctctgtccaaggacagtgtcacctgagagctgtcactgcagaagctgtggtgatactcagtgcccagagggccagcacacagtcagcctgagacagaggccgggacgcccatgctgcacaactcccgggccagcttctcagccaacttgcagaagggtgcccagcgggcgggctctacctcccagcagctgctcatgaggacatgcatggggcctggacagcccttgggggctccatgtggtaccccttctccacagcctctgacacctccttcagcctggctttgttaagaggagaggtggatggatgtgtgaatggatggtgggtgggtaggtggatggagggatggatgaatgggtgggtagatcaatggaacagtggatggagggatggatgaatagagtggatgggtgggtgaatgaatggatgggtacatggatggacatgggaatgggtgggggatggatgggtggggagatggatagataagtggatgggttggtggatggatgcatgcatggatgggtggggacagggggatgggtgggtgggtggatggatggaaggatggatggatggatggatgaaaggatggatgggtatgtggatggatgatgggtagataaatgggtggacagatgtgtgagtggatggtaggtggatggatggatgggtggacaggtggatggatgcatgggtggacggatggatggatggatggatgattgggtggatggatggatgagtggatggtgggtaggtggatgagtggatggtgggtggatggataggtgggtgggtggatggatgagtggatagtgggtagatggatggatgagtggatagtgagtgggtggatggatgagtggatagtgggtgggtggatggatggatggatgggtggatggatgagtggatggtgattgggtgggtgaatggatgggtggatggtgattgggtgggtggatagatgggtggatggtgattgggtgggtggatagatgggtggatggtgattgggtgggtggatggatggatgggtggatggtgattgggtgggtgtggatggatgggtggatgatgggtgagattttcatgattggttcaggccatcatgaaagaagcagaagtgagagacatgcagaagtgggagaggcaggagcaggaagagaggggaacgaagcctgggctgtggacccagacaggcccagattcaaatccaggctctaccatattttcttggggcaacccagtgtgagcaacctgccctctctgggcttcagcgtccacgtctgtgaaatgggtgtaatcctggcactcacctccagtggcattttgggggtctgacctgaaagcactcaacatggggcctggccatgaatgggggaggcaggaggaggagggtggcctccccaggccatccctaaatggggctgctgccacacatgcagaccctcctggggctcccatcatgggggctcccatagggatatggatggctggggcctgagaaagggctgtggtgggaggggagacttggaccttgagggctgttggcagcctcccaagatcctttaagcctgggaccccatgggttgggaaagggtgcccaccactgaataccacatgccctgggggactgcagtggggaacccgtgggtaatggcaagtgggtcccctgcccagaatcccccagggaacggtgtccccacagtggccagcaggcaggtgccagctgggcagatcctccatgggccaagatggggaggcccccgtgtgcaggcatgtggccacaggaggcaggggcttggggccggtgggtgcccaagactcggccaaggatcagtggggtcccaattaattgatcccatcatgtgggctgcagtgggttccacagagtaggaaggtgaccactggggctggggcacacagggcatctagggggggtggacctctaagggaggacccaggatgcctggcgcctgggggtgtccgagagcagatcaccaaaggtggcccccggggaagagggcacggggacacagagacacacaggcgcctagagtccttagaatccgtctttatcgggcgatcatccttcgcaggtctggggtgtccacgggccgcccagagccccctacgtgggccagcccctgctgtgggcaccaggaggatgacttgcccgcctggaccctccttgggcctggtcagtgcccccacgccgcactctccactctctcggtcctctggggccaagggccccaccgggtggggtcagggctcctggcttcggggcgaggtggagccgtcggcgtcctgccctgagacggaggctggggcacctgcactgcgtagctcccgggccagcttctcggccagtttgcggaagggtggccggcgggcgggctctgcctcccagcagctgctcatgaggacgtgcacggggcctggacagccctcggggggttccatgcggtaccccttctccacggcctccgacacctctttcagtgactgcggacagcaggcgtgggcaggggtcagggccacagcctctggacctgcccggaacccagtgcctccctgggacccccgctcaccattttagggtacggagcccgtccatatgagaagacctcccagagcagcaccccaaaactccagacatccgacttgctggtgaacttctgtggggcccgagacgggggtgaggagggacccctcaggttttctgctccagcccctgcttcctccaggaagccctcctgggttgaccctcactctctggtcttctcctaattgagtcctcccccaacgccgcccgcagttgagtctagctcagccttagtgcatgaaggaagcctggttattcttcccttcagtcctgagcccacgcctttttcagagctggagaaactgaggcccagaggggggctacgaggaacaattatgggccaagagcttcctggggaggcatagccattgcccttggagtttcagagaggccaagggacatacccagggtcatacagcagagctggggggaccccaaagccccaggggtatgtgaaggcagggctcaccccgtgtttgagagcctcgggcgccgtccacttgacgggcagccggcttgagtctagccccttccgctcggctttggccaggccaaagtcgctgaccttggccaccaggtcctctgagaccaggatgttgcgggcggccaggtcgcggtgcacaagcttcttgctctccaggtactccatgccctcggccacgtgcctgggggtagtagggggcagtgggggctcaggtgccaggatgcccacattcagggctcagaaagctcggggtgcctggggccacaagctcacaaagcctccctgccccgtgcctcagtttccccttgatggatcttggaatctgcgccccgacgaccccagtgccgcagcaccctgagagtcccacttacagagaaaactgcaggagctgagcggtgttcacgagggctcgaccccgggtccgcagaaagttcaccaggttgccctgttgggggtgggagatggccgcgggatgttggggctgctccgctgcgtgggccccctccccgcctgggccccgccccaccttgctcacgtgctccatgacaatgtacagcccctggtgcaggatcacgcccaggagacgcaccaggttctcgtgttgcatcttcctgggggcggtggggtgggcgtgagggcagggctgggaccccccccgtcccacggtccccagccccaccctgggactcacgtcatgacggccgtctcgtccaggaaggcctgggctgtcacatcacacttgatattcttcacggccaccttttgccccaggtactcaccctgcaggacagctggggggtgggggtggggaacggggtgagatcaggacccccaacaaacagggacagagagacagacggacaggcccgctcacaccggtgcccatgtaacattcacacagctgcgggtccccagaccttgaaacacagaccccatgctcctcacccctgccgcccttgcaagctccagacccaagatcagagaaccatctggctctggcgcggtggctcacgcctgtaatcccagcactttgggaggctgaggcaggcggatcacctgaggtcaggagttcaagaccagcccgactaacatggagaaaccctgtctctaatgaaaatacaaaactagccaggtgtggtggcacatgcctgtaatcccagctactcgggaggctgaggcaggagaatcacttgaacccgggaggcagaggttgcagtgagccaagattgtgccattgcactccagcctgggtgacagagcgaaactccatctcaaaaaaaaccccacaaaaaacaaaaacaaagagagaaccatctaagccaggggtctgtgaacccccaccccctcggggccaaatctacctatcacctctttttgcaagacccttcagctcaaaatgttttttgcatttttatttttaattaattaattatttatttgagacggagtcttgctctgtcgcccaggctggagtgcagtggcgccatctctgctcactgcaagctctgcctcccaggtcacgccattctcctgcctcagcctcccaagtagctgggactacaggcgcccaccaccacgcccggctaattttttttttttttttttttagtagagatggggtttcaccatgttagccaggatggtctcgatctcatgacctcgtgatccgcccgcctcagcctcccaaagtgctgggattacaggcatgagccactgtgcccggccaacatttttatttttaaaatattgatacagggtctcactctctcacccaggtagagtgcagtggcgtgatcacagctcactgcaggttcaaattcctgggttcaagggatcctcccatcccggcctcctgagtagctgggactacaggcatgctccactgtgcctggctttttttttgtacagatgggggtctcgctacgttgtccaggctgcacctgaactcctgagctcaagggatcctcctgccccgacctaccaaagtgctgggattccaggcatgagccaccgtgcctggctggtttttgcatgtttaaatggttgtaaaaacaaatcaaaagatgagtgctgtttcaggacatgtgagcattacacaaaattcaaatttctgggtcatagttttcatggccacgcccatatgtttacatattgtctgtggtcgctttcactccacaagggcaggattcagtagtggtgacagcagctacctggcccacaaagcaggaaatatttacaatctggccttttacagagagtctgccgacccctgatctaaaccccagagccttccagaataataatttcagggaatggtgtttcaaacattccaaacagtgggactgaccatacaagaccctggcagtgtgaagaagtcactaacgttgactgagcgcctgcttgagttcacttactcctcatgacagctgccattaccccctgttccagagggggaaactgaggctcagaggatttgcacgtcttcagctgcacaactagtaggtggttaagtatgggtttgaattcagctctgtgactccaaagcctcaatacgcacctcccatcttccttcagcacccccaacccagtccgccactcacctccaaactctccctctccgatctgtgctcccaatgtcaaatgctgcaggttcagtaaccagcccgctgtggagtgaagacccagtcagaggggtaatgggccccctaaatcctcccattgggggttctacttggtgagagactaggtgatgtctctcacagtgctgcagctgtggatacacatttgagtggctgctgggcctggcaatgcccctaggacatatcagagacaccccactcctggtaccaattattgttgttgcaagcaacagaactatctcaggttgacctgaacaaaaaggggcttacaggagggatagtggtgtgaatagtcaaagctgggggcctgcctggctgagaccctcagaccccacacttgccctccaggaactcccagtcaggcccaaggggtagtgccaggaaacacttcagttctcagagataagagctgcccttttctctttggctctcttgtccctccaaataccctctgggctcttccctacacagttctttacctctgaccaccccagaaacacacacagagcaaaaaaacacaacatggagacccataaaggttccagaatattccagggctctagcctccctgacccttctcccaagcactcctgtgttgtcccctccactgccctctggtcggttctgcagacgttctcttctccctccagaaagtgccccctccaaatgccacggtcttaagagatcattggccagggtgatgctagtctccacctggatgccatccctgatgggtacagacttccccagcagagagatactttcaaggagacagacatggggtcagaggaggcatttgcttttgaccttaaatattgaggatttcactacttaggggctggaaaagcatttcaggtgaagggaacagaatatacaatggctcagaggcatgaagaaaacgatgatcacagttgacctgggagggggtggatgtgtggaggaagggctttgcagatgaggctggaaaggtggctcaggccatgcaggcaggttctggaaggtggtggagctgctgggcctctctccctggaggcatggtttcatgatagaaagataaccttgaggctgcactcaaggcctgggctggaagggggactcgccctctgggaaggaggcggtctgatgggagggcctgaggctgggctgtggggaggggaggggagaagattcaccaggtcttgggaacctggccaaggagggaatgctggaggatggggtgggtggaggttcggggccaggtttctggctcagatggtggatgatggtgacagatgagtggcgaagctggggacctattgaataaaggactgatctgtgtctgtgggcacccccgaggcagcccaggtcttctatcccatagctgggcatggagacaggcttgggtgatctggcctcagaggtgcggggccccagggcccttcctcccggactgggctaacgtgggtagggaagggggtctgccctcctgggcgtcccctacccctggccagctcctcctcggccgacttggtcccgtgtttccgctttggtctcaccagcttggtgcagatagcgcccttgtccttgctgtaatgctgcaggatggtgggacagccatgagcccagccccagggaggggaaccccagcatcctgttccgttcccgggtggcctctgggtggggtgggtgggaccggggaggaggagaaaggctggtttccataggaacgggaaaggaggcaagccaaaaggagggggagtcctctggattggtatcaacttggggggtcctggggggtccccagaggagtcactctagtccctggaggtagaaccaggctgactcaggccacctgtagattgggcagtccatagggatcagcccccctatttctgcattaaggggaatcctactgtgggggtcctcctgtctgcccatctgagatgggatgggggcctgggggtgcctggggggccctggggaatacccccttcatctccacattggggaagcacagagctcagggggtcccgggtgatcagcacaggaggtagggatggtgtctgcccagctgctggggaagggatggaggtcaggtgacccgcccctctatctctacgtaggggagtctccggagtccctgggctgccccactgcagggacggggtggggcctctgggtggcagcacctccaccatgtccatgaggttgcagaagaacacggcctcatcgattgtgaggtggccgtcgcggtgcagcacgcggtagtggatgacgtcgcggccaaagctcacgcacaggacgtagtcgccggggtggcgcgcggactcccgcaccaggaacagcccatcctcgggaggctgcagctgctggacagcctcctggcccgagatcttcccgtggaaccacctgcggccacggaaggggtgggtcagactgggctgtggagggggggtcacttgctgtcccctaccccaggcccctgtcctgcccactcacggcatgaggctgagcttggggtctgcggagagggcctcccgctcccgcagcgccccagctgccagcagcccctcctgtccactggtgtggtgcttgacgcggtaccagctcttgttctgccagggaggaagcacggggttagtgtggggggtgtgggggtggtcctggtggagcccccagccccaagcacccacacccgccggccacctctcacctcgcaggcctccaggatggtgaccacgtcgcccttgcggaaggccagctcccctggcttggggcgggtgtgctcgcatttggtgatacactgggtgcccggggcccagcgcctctgcagagggggccgggagaggggcaaagggaggacatcacggagatgtggggagcagaggcacgggaggggaaagaggacaggagggagaaaggtatagagattggaaaagagcggagaggcagagaaaacagacgcagacatcgggggaaagaaagggggagtggggtgctcagagagaaatcgtagagtcacaaagagaggcggcctgggacagaaggtcaggaagccaagatgactgagaaaggccaggccgaggccagcagaagggggtagggggcagagagtacagcccttcaggaaggggtctcagggtgtggacggagttgaagaaggacccggggagcagaggaagcaggctagacacactcaccgttggcatcctggctgagacgggaggggggtgccaggctcggaggaagcgggggctcacctggggaggggacagagtccaggtgggagctgggctgggacccacggtccagttcctaccacttccagcccaggtcaggtgggggcgatggctgggcaggcagagagagcctccccagaggcatcctggatgggacccagaactggctccccaagcccctgtggggaagtgatctttacccggggaagttcctcagcagaatcacagccgtgaaatgcccgccaggaaaccagagagcctcgccccgccatcgcccccagagggaaactgaggcaggtgagaggcacactgagcaagtggtcacagtcggggacgctgggaatggcctgccacaggccagtcggctggcacaggaggtagggagctgggtgccactggaccgagcctggttcttcctgttttctggttggtaggcaggggcagggtggggaaatagggatgagtcaaggtcattcccaagaatctctgaccgtggggtggagctgggggcaggggcgggtcctgtagccctgctgggctcctccggccacccgctgagcctctctgatccccccccaaacccaggacagacacacaaagtcactcattgctgcaggggtgggggagcctccctgcctcccccatctccccgaccgctagtggctgggaagtgggcggtgctggggggtgagtctcggcccctccaagatgcgcctcccatgaaatcctccagtcccacgtgtactcacacgcatacggatgcatgcacacgcacagaaacacacagggctcggacacagctgcgcgcagacaagcaaaggaccacgtccacgtggaaacaggtgtgcgcacacgtccccgcgcatccgcgcgcacaagcgctccacacctgggaacgtgcgcacctgtcccccgcccccggcacacacacagccgccccacactggaacacctgggcgccagcgccgggccactcgggcacgcagggcgctacgcagggccgcgcacacgcttttcggccacacgcgcacagccctccacgtggacgcgcgggtacacacgcccggggctcgtagccgcgcacacccgcacccaggaaaccccagccaccaccacgcggggtccgatcgcctctgagcaccctccgccccagccgcgcacccgctgcgcgcccgggacgcgcacactcgcgcacacaccggcccttcctgcgcacgtcccgggcccacccccgcctagagccctcggggtttccccccaccccggcctcggggtctctccacgtctccccgccgacgtgctcacctgctcagggggcgcccccgagccgcgccccgcgcccgcccccaggagggcctccgcgagccggctgcacaccccgaggcggtcccggctgcacaacttggagcgagttgctccgtttcctcattttgggggcgaagaagggtcggggagtgggggaaagcgggaggcgccgcggcctgggaggcccccgcgggtcctagcgccggccgcactgcggtctcctccgcgcgccgccgccgccgccggcccctccccgccccgcctccgcggcccccggcgcctcccgcgcgccccgggcggggtcccggggcgcacgcgggctccacgcctggccctgacctggccctgtcgggcgtgcaccccccacccaccctgggaagcggggttcttggagcgtggaacgggcgccgccagtgcgcgcggcggggaccgggggtgagggagagtgagctgcccgtccggggagataagcaaggcgccaagcccggactcccagaggacacttcgtactctgcaattccaactccctcagtgtcgcccatttgagcacccaccgtctcagagggctattggtggttgacaaaaaaaaagctttcaaaatgtcagccgctatcaatatcattatcataatcatcaacattaagggaaaattggagtaacagaatcatcgggaactgtaatcatccggatgcaaacttcttagagctgccctccttggagggtaaaaggggggcctgggagttggagggacctggctctgcccgtaggtaggaggtaccccttttccagccgggatttcctcccccatatggagggtgggggccccacccgctttcacctcacagaacagtttgatctcacttggtcttggtggacagggccctggcccccagcgatggctttgtggttggggtgaccaaaacgcccaatctgctttcacccaatgcaggcctttatctttatttttattcatttattttttgagacagggtctcactctatcccctgggctggagtgcagtggcgtgatcatagctcactacagccttgaccacctgggctcaagccagcctcccgcctcagcctcccgtgtagctgggaccacagggtaattttttttttcccaaattttcatagagccatagaaggggtagcctcaggagggggtgagttccctgtcctgggaggaatccaagaattggccactttgcctttttttttttttgagatggagtcttgctctgttacccgggctggagtgcagtggcgctatcttggctcactgcaacctccacctcccgggttcaagcaattctccttcctcaccctcctgagtagctgggattacaggtgcgtgccaccacgccctgctaacttttgtatttttatttttatttttttgagatgaagtctcactttgttgcccaggctggtcttggactcctgggatcaagcgatcctcccatttcggcctcccaaagtgctgggattacaggcgtgagccaccacgccttgcaccttatcatcctttctaagggatgagtcctctgaaacaaagatgaagttcatcttaggagggcaatgaaccgagatgcccaggtggcctgcgcccatatttaatcttctgttaccccaaaaggctgtgtgtctggacttgggggcatcacatgattttgcggggagcagaggcccagttacaagagaattacagaacagctatattaaggaacattatgcagcagactaggaaactatattattattattatcattattagagctgggggtctctctgtgttgcccaggctggcctcaaatgcctgggctcaagcgaacctcctgcctcagcctcctgagtagctgggactacacgtgcacaccatggtgcctggttaaaccatactattatatatattatattattaatatttatattatattatattatattatattatattatattatattatattatatacctggggcatccaggatgctctctcatctcaatagcatcaacttaatcccatctgtaggctgggcccagtggctcacgcctgtaatcccagcactttgggaggccaaggcgggcagatcacctgaggtcaggagttctagaccagcctagccaacgtggtgataccccgtctctactaaaactacaaaaattagctgggcgtggtggcacatgcctgtaatcccagcactttgggaggccgaggcgggtggatcacgaggtcaggagttcgagaccagcctggccaagatggtgaaaccctgtctactaaaaatacaaaaattagtctggtgtggtggtggatgcctgtaatcccagctactcgggaggccaaggtagagaattgcttgaacctgggaggcggaggttgcagagagccaagatcgcgccactgcaccccagcctgggcaacagagtgagactctgtctccaaaaaaaaaaaaaaaaaaaaaaatagagatgggatctggctatgttgcccaggctggtctcaaatttctgcactcaaacgatcctccaaccttggcctcccaaagtgctgggattccagatatgagccactgcactatctcagctcactgcaacctctgcctcctggattcaagcaattctcctgtttcagcctcctgagtagctgggattacaggcacatgccaccacacccagctaatttttgtacttttagtagaaacagggtttcaccatattggtcagctggtttcaaactcctgacctcaggtgatctaccaatgttggcctcccaaagtgctgggattataggcgtgagccacggcgcatggtttaccggcctcaactttctttcatggggttgtaatttactattagaagatcttctgggaggatgcccgtgtctacaattttagcacccacagcttcgtggatctggctgtgggatagtctggggtgtggctccccagaaagggctggggacgctgcagctgtccttctgtcacagtcactgcgggcccaccatatatggcaaaccaccatcacttgcctgaactagaagtgttaagtcaaaatatctgcagcggaaaacccagccgcctaatttgattctcaccagaagctgctgctgaccacgggtccctcgccgaggtctgccttctcttcgttcagcagggaaatgtccctgcatgagagggacatttaagatgctctagcaccccatgaagactttctcctcttcctctctctgcaaatcaatgatattagtgtcagtcctcccgaggagccccagggctccgggcaggaggcctcaccccagaagaaataataaggggaaccaaggtcttgagcccagagaagggcggacttaaggagctggtgttgggttcgcaaattgtcaagggctggctggggcagggagctcccctgactgggtggagacatagacactgagctgtgcctgactctagggggatagatttgagcctgcggtttatttgaatcagagccacagaaggggtagcctcaggagggggtgaggcatccaagaattggcaactttgctttttttttttttttttttttgagatggagtcttgctctgttacccgggctagagtgcagtggcctgatctcggctcactgcaacctccatctcccaggttcaagcgattctccttcctcagcctcctgagtagctgggattacaggtgcgtgccaccacgccctgctaacttttgtatttgtatttgtatttttttgagatagggtctcactcctgtcacgcaggctggagtgcagtggcgcgatctcagctcactgcaacctccatctcccgggttcaagtgattcgccttcctcagcctcctgagtagctgggattacaggtgcccgccaccatgcccagctaatttttgtatttttagtagagacagggtttcgccatgttggccaggctggcctggaactcctgacctcctgaccaagaattagccactttgaatcacaaagactctagggctctttcaggccccagaggtggccgcaccagtttctaatgcttcctgccaaggagctgggggactcaccccttccttataccagcctgagtgggtagactggacacccagattcccccagtcctgaactccccaccctccacctctcatccttggtgaccccctgtcaacttgatttcagaagttctctgatctgcaggtcaccctcctggtgcaggctggtgacagagcagtcccctttctggcgtcctggctgcctccaggttttcacctttcactgcaaagccaagggaaagaaacgtgactgtgtcctccctcactctaaatccttccatagctccccactgcctgcaggagagagcctaaaatgctcagcctggcatccagggctcttcatgtttggcctccagctgatctcccaggtcccattttctcctcctccctccaagaacctaatattctagtgagtccgaactgcagaagtttccacgcctttgcactggctgttccctctcccctggaatgcccttccccgccgtgtccagctggcctctccaagctcactctcccacacacaactcatgtggcaccatttggggaaagccttcctcaaggacatccccatacttcctagagcaaggtctccctgaaagggccccttgctagaggcactagctctcttgtctcactgtgtgataggtgtgagcctggccgtctctccttggtcttggtgactgagcccattagcctgcctgagaaggaggccagcctggaggaaacagagccaagaagcagggagagacactgaatcccaagggaaagactggttccgtatccttagaaccagcgatgcctggaattcacgtgacacctagttttagcagccagtctttcttttttgatttcttcccgagggggttctgctgcttacaatcaaagggattcttaatactcaaaatagtaccagaagtggggagttaaaattaacagactaatgtggaattgctgagtcaaattagattccctgatcccagctgggaagagggatgcctcgagcttctctttccgagagtccataaacctgccttccattccctgagtcaggcggcaccaggcttctgtcctttgcaatgcagcagcccagtggacacagtcatctctccacctccccccacttttttttttttgaaacagagtattgctctgttccaagacgagtccagtggcacgatttcggctcactgcaaactctgcctcccgggtttaagtgattctcctgcctcagcctcccaagtagctgggattacaggtgcccaccaccatgcctggctaatttttgtatttttagtagagacggggtttcaccatgttggccaggctggtctcgaactcctgacctcaggcgatctgcccgcctcggcatcccaaagtattgggattacaggcgtgagccaccgcacccagcctccacctcctccccttcttgagtgtttttctatttctttcctatccaaatctcacagttcttcacatatcactctcctcccatagacccccctctggctgtcataatctgcctaacccactactctccaaattcctagagatcactgagaccagtcttctcatttgagaagtagaacagctgaggccaggcacggtggctcacacctgtaatcccagcactttgggaggccgaggtgggtggttcacctgaggtcaggagttcaagaccagcctggccaacatggcaaaaccccgtctctactaaaaatacaaaaattagctgggcgtggcggcgggtgcctataatcccaagtactcaggaggctgaggtaggagaatcgcttgaatccaggaggctgaggttgcagtgagccaagatcgcaccactatagaccagtctggcaacagagtgagactccatcttaaaaaaaaaaaaaaaagtgtaaagtggaacagctgagacccagagaggcaagactactcatccttgatcacacagctggctgggggctaaacctcaggcctgtagactcccctgattggattgcaaacttctctaaggcagggcacgattcttattcttctctacaaatactgttggaaatcatagtaggcaataaacatagtaggtgatgagtcatatgacagatactttacaaaatttatcagtcagggttgggattggctggctgggatggagaacttcaaacgctagaggcttgaaattgatagaaaggcatcgtgactgaggcaggcaatgctgggcagtgttagggactgggctcctgcctcttgttcagcctttttcagcacatgaatttccaactctttttttttttttttttttttgagatggagtctcgctctgtcacccaggctggagtgcagtggtgcgatctcagctcactgcaacctctgcctcctgggttcaagcgattctcctgcctcagcctcccgagtaggtggtattacaggtacctgccagccaccatgcccggctaatttttgtatttttagtagagatggggtttcaccatgttggccaggctggtcttgaactcctgacctcaggtgatccacccacctcggcctcccaaagtgctgggattacaggcgtgagccaccgtttccagcctcacaattgaactttctgaacctggaggacaggccggggtggggaggccactgcagccagacatggggacacctgagccgccatggcctccatggaagccgtccccggcctagccgtcctcggctggaatctgcagttagatcacactgccccagttagcaaacctttaaatttagcttcctccccccagccaggggactccgggattgaggggaggaacgctggctctttcgaggaagaacgctgcatcactcattctgcaaccagtcgctgtctgcccggccattctcgattccttgaacgaagggcctcttggggcgagctgctttgggcgtctttgctggaaaacccttgccccgtcttcctcgtccttaagacgcagccggacaggttgttttccagccacacttgcaggtttcatccgtggaaactgggtctgtgtcacatccggccttaaaagcttcccggctgggcgtggtggctcacgcctgtaatcccagctctttgggaggccgaggctggtggatcatctgaggtcaggagttcgagaccagtctgaccaacatggtgaaatcccgtctctactaaaaaaatacaaaaattaggccaggtgcggtggctcatgcctataatcccagcactttgggaggctgaggagggtggatcacgaggtcaggagatcgagatcattctggctaacatggtgaaaccccgtctctactaaaaatataaaaattagccaggtgtggtggcgggtgcctgtagtcccagctactcgggaggctgaggcaggagaatggcgtgaacccgggaggcagagcttgcactgagcggagatcacgccactgcactccagcctgggcgacagagtggagactccatctcaagaaaaaaaaaaaaaattagctgggcgtggtggcatgtgcctataatcccagctactcgggaagctgaggcaggagaatcacttaaacctgggaggtggaggttgcaatgagctgagatcaggccactgcattccagcctgggtgatagagtgagactgtcaaaataaataaataaaaaataaataaaataaaagcttcccatggttcccactaagctcagtgtgcctcccggtgctttgtcacctctgcggtccagtggctgtcacctctctgctcccagcttctcccttgtctcccaaaagctcaggcatggggcagccacaggacctttgcacatgctcttcctatctcctagtactacatccttcccccagctcttctcaaggccagctacttctctgcactttcagcttctccaagagaccctccctggccaccccacagtggtcacccttagttactctctattgtcaaagccggaatccccacctgttatcctgtctcactcgtcattgtcaatctccctccatccttgcttcccacgacagaatatatcttcctaatgagggtaacgaccagccctgggcccggcaaccatttaggtctggagcctggcacataaaaggcccttacagaagcagatgagagggtaaagtctgaggaaggaggccaggcatgaaggctcacgcttgcaatcccagcactttgggaggctgaggtgggaggattgcttgagccctgccattggagaccagtctggccaacatagtgagaccctgtctctacaaaaaataaaataaactagctgggtgtggtggtgtatgcctgtagtcccagccactcaggaagctgaggcaggaggatcacttgagcccaggaggttgaggctgcagtcagctatgattatgctactgcactccagcctgggcaacagagcaagaccctgtctcaaaaaaagaaaagaaaagatcaagtaaggagaacaggagatacacattattccggaataaaccagtcatgtctactcaagagcagcccctaagtctctcctccaggatccctcttcatcctctcatgacctcatgctctaactcagggcccagcaaactgtctctctaaagggcatgctggtctctgtcccaactactcagctctgccatttcagggacaccatagataacacagaagccaaagaccgtggctgcattccaataaaactttatttatggacatggacatttgactttcatattacttttcttttcttttgcttttttttttttttttttttgagctggagtctcgctctgttgcccaggctggagtgcagtggcgtgatcttggctcactgcacgctccacctcccaggttcacaccattgtcctgcctcagtctcccatgtagctgggactacaggcgcccgccaccacacccgcctaattttttgcatttttagtagagaagggatttcatcgtgttagccaggatggtctcgatctcctgacctcgtgatccgcccacctcggcctcccaaagtgctaggattatgggcgtgagccaccaagcctggccttttttttttttttgagacagagtctcactctgttacccaggctggaatgcattaacgtgatctcggctcactgcaacttctgcctcctgggttcaagcaattctcatgtctcaacctcccaagtagctgggattacaggcatgtgccaccacacccggctaatttttgtattttagtagagatgggtttcatgttggccaggctggtcttgaactcctgaccttagatgatctgcccactttggcctcccaaagtgctgggattacagatatgagccaccatgcccggcctcatatgacttttcatatgtcatataatattgattccattttcctccaactatttacaaatgtaaaaaaacgattttagctggaggagttgtgcggatacagatggcaggttggacttggccctcagactgtagtttgctctccgctgccttctcacagtctttattttctcataagtaggtgcttttttttttttttttttttttttttttgagatggaatctcactgtttcgtccaggctggagtgcagaggcgtgatcttggctcactgcatcctccgcctcccaggttcaagctattctcctgcctcagcctcttgaatagctaggattacaggcacgcgccatcacgcctggctaatttttgtatttttagtagagatgaggtttcaccatgttggccaggctggtctcgaactcctgacctcaagtgatctgcttgcctcggcctcccaaagtgctgggattacacgtgtgagccaccagctgtatttttcaatctgttaaattaaatgtgctgatactcatggcatgtaataagctctcaagaagtgtttaaaaaaataaaactcaaaatatataaataaagctcctcaactcagcaatgagcctctcaagggtaagtatattcttgttggtatgaatagcagctgatatttatagggtgttttactgtgtgctgaagacaaagcaatataatgtcccactcctcaggggttgctgttgctgttttcaggtatttacctccatagttccaagtaatgtgttttacacatcccttgatttatcagttggatgttgtccattgacttcctattccagaaggtcaagatttagctctcttaggcattctgctcccccaacagttaaatcacaatttttgcttaaatgaaaattcagtgcttatagtatatatattaatataaatattattgacagtggagcaatgtatactaagaacattattttctgggacctgcttttttatttccctggagttagtcatcgccttggttttatgtgtctgtgactctttcccccagcctctccaccagaactgacatctccactcaggactttctcctactgcccagctgtgatcctggcccctctcttcttcggcacaaggggattcttagatatagctcctgtttcttgggtgtgggtctccctgtttcttggtttggtcccttgttttaggaatgtgctccccctagggtttccagagaaagtgttttcctcctactctcctgggtaattagaggtttggctgacagtattgtaggtggatacttttcttttgcccaatgttttccagcttctagtcttgggcagctgaatgatcagaagttgtcctgtttcctcatactttgcctgtcccatggttaatttctgtctctctctctctctttctggaagcttgtagaatcttcttgttccctacatcctgcactttcacagtggtgggtttggtgtgggtctgttttcaaccattgtgctgagtacttggtgggctctttcctgtgttctcttcctggcaaactttcttgaatgatatcattggtgatttcttccactttggtttctctggcgtgtttgtggaacacgttattgtcatagggtggacttcttggattgatgttttcattttcttgcctaccttcccccccacccccccactttctactttttcttccaacccttctattgacattttaattttgactattaatttttttttttttttgagacagggtctcactctgttgctcaggctggagtgcagtggtgcaatcacagcccactgcagcctcgacctcctgggctcaagtgatcctcctgcctcagcctcccaagtagctgggactacaggtgcctgccaccatgctggctaatttttttgatttttagtctcactatgtttcccaggctggtttcaaactcctgagctcaaacaatctgcctgcctcagcctcctggagtgttgggattacaggcatgcaccaccacacccagtgactgtcagagttttaatttccaagagctctttctggttcttttaccgttcctctttaaaggacaaacttggctgtgtgtggtggctcacggagctcaggagtttgagaccagcctgggcaacatagtgagaccccaatctccaaataatatgtaaataaataaaagaatttcttggcccagtgcagtggctcacacctgtaatcccagcactttaggagtctgaggctgatgggtcaccagaggtcaggagttcgagaccaggctggccaacatggtgaaaccccatctctactaaatatacaaaaattagccgggcatggtggctcatgcctataatcccagctacttgggaggctaaaggaggagaatcgcttgaacctgggaggtgaagtttgcagtgagccaagaacacatcactgtactccagcctgggtgacagagggagactccatctcaaaaaataaaaaataaaaataaataataaataaataagtaaataaataaaggcaaacttatacttgtttcctggctgttatatcctctatgagctctccgaggataagatgcatacaggttttgtttttttctgttctgtgtttgaatcaggaacataaggatttttctagaactgttttcttctgccctctttgtctctccttcaggttacttttcttttctctttgtgggttttggtctctctgttgactaacaattatgatggagtgctacagagctgacggaagcctcctcaccacagggcggcctcactgtggggtggttggcgggtgggggtgggggtcactgggcaggaatcccgaaacattggcagcatctggaaggcttttctcatagcctggcatccagcgttctagaagccacaagaggttagacatctggggttgtgactttaatggcctggattttttattttttttatttttttgagacagagttttgctcttattgcccaggctggagtgcaatggcacagtgtcagttcactgcaatctctgcttcccaggttcaagtgattctcctgcctcagcctcccaaggctgggattacaggcatgtgccaccaagcctggctaattttttttttttttggtagagacgggatttcaccatgttggtcaggctggtcctgaactcctgacctcaggtgatgcacctgcctcagcctcccaaagtgctgggattacaggcgtgagccaccgtgcccggcctgttttttttttaaggcagggtctcactctgtcgtacaggatggagtgcagtggcgtgatcataggtcactgcagcctcaacctccagggctcaagtgatcctcctgcctcagcctctcaagtagctgggactataggcatgcatcatcatacctggctatttttttttttttttcagagatggggtcttggtatgttgcccaggctggtctcaaactcctgggctcaagtgatcctcccgccttagtctcccaaagtgctgggattacaagcatgagccactgcacttggccttaatagcccatttgcacagcccctcatccctgccctccatggcgcctgggtccctgtgcctgaacctttctgtgcagcaagcattttaaaatgcattttcttactgaattctcctcacagctctctgcacagttggggactaccagtttgaccccaattttatggaagcttaaggcggtaacatgagctgtccccacactccatagctgataagttaaagggccacgctgtgactagagcccagagtcaccctcactgcgtgaagtgacggcttctggctcatccttgggtgtcccaaggaaggcagtgagtgtttgctgattgtctatggaataaatgtcaacatcctcaatgggagaaatagggaaaccacatgaatgaaggcccagcacacatcacaggtgttcaacacacagacggaattaatgagcaactgaaagaacaggagttgaggccgggtgtggtggctcacgcctgtaatcccagcactttgggaggctgaggcaggtggatcacctggggtcaggagttcgagaccagtctgggcaacgcagtgaaaccccatctctgctaaaatacaaaaaaattagctgggtgtggtggtgggcgcctgtggtcccagctacttgggaggctgaggcaggagaatcacttgaacccaggaggcagaggttgcagtgagctgagatcacaccattgcacttgagcctgggtgacagagcgagaccttgtctcaaagaaaaataagatgtgtcagccgggcgcggtggctcacgcctgtaatcccagcactttgggaggctgaggcgggaggatcacgaggtcaagagatcgagaccatcctggctgacacggtgaaaccccgtctctactaaaaatacaaaaaattagctgggtgtggttgcaggcgcctgtagtcccagctactcgggaggctgaggcaggagaatggcgtgaacccgggaggcggagcctgcagtgagccgagattgtgccactgcgctccagcctgggcaacagagcgagactccgtctcaaaaaaaaaaaaaagaaaaaaaggaaaaaagaaaaataaaatgtgtcttgtagggtcatgagaagaattaaattagataataagcacacagtaaataggtgatgaatcaatgtcgttataataccaagtgaagaaaagcaggaagcaagatggtaaaaatgacccacccataaacaacagggcattaaagaatagagagcaggatggccgggcgtggtggctcagccctgtagtcccagcactttgggaggccaagcactttgggaggccgaggagggcgaatcatctgaggtcaggagtttgagaccagcctgaccaacgtggtgaaaccccatctctactaaaaatgcaaaaattagctgggcgtggtggcaggtgcctgtaatcccagctactcaggaggctgaggcaggagaatcgcctgaacccaggaggcggaggttgtggtgagccgagattgcgccactgcactccagcctgggcaacgggagcaaaactccgtcttcagaaaaaaaaaggaaaagaaagcagaagggaaatggagtgttcacagtagctgataattttgtggttgttttgtgattgttttgttttccttcttccatttttctggattgtccaagtttttcataatgggaaaaacccaattcatgagtaaaaacatttatgtggaaaaacacatgtaacaaaatttgccatcttaatcattttttatttttatttatttatgtatttttgagacagagtgtcgctctgtcatccacgctggagtgcagtggcgcaatctcggctcactacaaccttggtctccaggttcaagcgattctcctgcctcagcctcctgagtagctgggattacaggtgcccaccaccacgcccggctgatttttgtatttttagtacagacggggtttcgaactcctgacctcaagtaatccgcccgcctcggcctctcaaagtgttgggatgacaggcgtgagccaccgcgcccggccgatgcttcctaatgcatttcgtttgcaaaatttgggagtgaccgttttctacccagaggtggcttctccaccttaaccaggaaagcgggtcttaatccgatcacctgagacaccttctcagtcccagaagctaaactagggaggcatcccgggacaagacgggcaacaatcttttcccaaacgacccccgagcctggccagggagatgctgcctgcaaggctgactgtgactgggccgggggactcagggcatcttagcggccgcctctcgctcctgtccgtgaccttgcagatgcaggtgacagcctgcccttccgtttttgtctttccagtcccgcctgccggattgggttccagccctgcccacacgcccggtacatcccgcctacactcaccgatgtcgcctagcaacccggctcgcagctagcatccgcaaccgaggtccccgcgctccagttctctggcggggagggagaggggtgttgcttctccagccccctgcagcctggtgtcttcctgccacccgccggcctgctccgggaaccgcggcctggtgggacgagggttgcggaggacgggtcaggagcgaccgcgtttcaggcccgtggactccgcagcccagacggtccatccatctgcaccgaatcccttcgctaaccaactgcttgattttgctgtcgcgccgcctaaacttggttttttggagttgctaggagggccgacttaactctttgtcagccgggctggttttcacccacctggtggcaggaatcctgtttgccttccccgggagccagggatgggaacgggaactgtgggtgggaggcttccgagagccgcctctcccggggcataaggaaggaagcggggctgcaggtaccgcctggggttcacagcaggggacgaggtgcctcccaccaggggctgctgtgatcgccaggcctgccagggtgtgccccttcccctgtcccttccctctgtccccacagccttggctggagtccctcaccggtaacgagacagagacaaatggtgttctctgtctttctgagacagagttttgctcctgttgcccaggctggagtgcaatggcgtgatctcagttcaccacaacttctgcctcccgggttcaagcgattctcctgcctcagccttccaagtagctgggattacaggtgcccgccaccacacccaactaatttttggtatttttagtagagacagggtttcaccacgtgggccaggctggtctcgaactcctgacctcaagtgatccgctcgccttggcctcccaaagtgctgggattacaggcacatgccactgcacccggccgacaaatggtattctcataaccaccagaaagagacacgtcctctggtgtcagagcgtggctctgagcactgagaccgactcagttgctagcgtccacctggcctgcccgagatctgggaatacagtggtgatccaattgatggtgagaggcttcctgacaggcagagagttcacattctcaaggggaagacagataccaaatcgtttcaaagatgcatggtttaaagtcaaggaataggccaggcgcggtggctcacgcctataatcccagcactttgggaggctgaggtgggcggatcacctgaggtcaggagtttgagaccagcctggccaacatggtgaaaccccgtctctactaaaaatacaaaaaattagctgggcgtggtgatgtaggcctgtagtcccagctactcgggtggctgaggtggaataatcactggaactcaggaggcgaggttgcagtgagctgagatcgagctgctgcactccagcctgggagacagagaccctgtctcaaaaaaaaaaaaaaaaaaaaaaggtggaactggaattgacaagacatcctcatggattggccgggagcacagaggaatccaggaggcctccctggttgtgctggctgtcaccttgagccctgggcaaatggcggtgctgctgccgcgatgctgacggagagaggggctgtgtgtggacggagtgtgtagcaagggagtgaagttcccaagaaatctgggatagagtggaaagcaggagagagggtgtgaggtggaggaggacggtggcctagaggccgcctgccctccggggaggcttaaccagcaattcctgttgctgacagataatccctgctagaaggggacccctcggtggctccccacccccctcctttggcctgggcctgaaacagcggtccctgcacacccagcccctgccactcccgtcccgccgcccccaccctgcatctgcctcctcccccaccctgcatctgcctcctccccactctgctccccgcctgccccccgtcccaaacactgccagggaagccctgtgggctggaaactgtcacgaaactcttccactgtgaccaggtctcagcatctgaacaccctccgcccgccttctgagggtttgggaatgtggcgggggaagcactctgtgggcagaggcatctctcccaaactcagcgtagttgcctcctcctccaggaagccctcggggagcctccagagcatctcactgtgtgtctctaggatggggccaggggaaccctcaaggaccgaggcagagagctgggttatgggaggcgttgagatgaatgattctcagccggtgtgtctgtgttcccaggggacccttgtgaggggacagcctgaggatgcccacaccttggggagcagccactgagcagtgccagccccttgggcccctcccagtccacatttgggctgcagggtttctgggagacccccacccgggaccctgagaaggaggtgaagagcccagcatttggggtcacctgcaccccgcaggaaggacggcacggctcacacaaaagacaaatgatttcctttattccccctgcctcccaatttccaggtagctctacaaagacattcagacagagccacatgcaggctgtccttcaaacacagagaaacaaaactgagccactggctggagatcacatctgcccaaaggtggacttttctcattcaatgccactgggcagctggccaaagaaaaaaaaactgaccaagcggaaggtttgaacaggttggggtggggactcagaagggggtgcccccacatccatcagtgccaggaggcgcctgcccaccatggccagcatccacaagacggcggcccctccccgggtcccccaggcacgggtcccgggccctgctaccacaaggggggattggggaccccctgcctcagggccagccaaggcctacatcagggagagagggaggaaggaaggacggaagctcaaatccaggcctcagtgacacatggcagagtgggttttctctgtgaaaggcactcagtggtacagggctcggggcggggggtgggtgggggtgcctctgggctccgggtctgactgtccagcacagctgttcccgggggaggcccagccaggatcctcatcgcccgtcggcgtgtccacctggccctgtggctctccccacaggggacgagcctggctcaggccctgctgacatcctggctgtggaggtgggtggggggtctgtttggagcaggctgggctgggggcgtggggatgccggctgggagctcccctgggcttgtcctgcacatgtggtggggccccagaacagggcctgcccacgtgatttcaaatccatgccgcagccgcatccaaagaaagttttgtttgtttgtttgtttgtttgtttgtttctttgagacagggtctcgctctgtaacccaggctggagttcagtagcgcaatctcggctcgctgcagcctcgaactcctgggctcaagggatcctacggcctcagcctcccgagtagctgggactacaggcttgggccaccacaactggctaattttttgtagagatggggtgtcaccatattgcccagactgatcttaaaccgctgggctcaagcgatccaccaagcttggcctcccaaagtgctgggattataggtgtgagccaccatgcgcagcccagaggaagtattttaaaaccccttcctgtaccacgaggtgagtttagagccagcaagatgcccccgagtttagaatctgcttgctgtactgctggcccccctggctgtgggggatggggccctcgaggaaggggtgccactcccagggctggatggtgtcatttctgtaacaatttaagcacaaatgttaaaaaacatttcttttaagtgacaaagtcttcttctgttgcccaggctggagtgtcacggtgcaatcacagctcactgccctcctggcctcaaggctccggactcagcctcccaagtagctgggactacaggtgcacaccaccacgccaggctaattgttgtgttttttactagagacagggtttcaccatgttgaccaggccggtctcgaactcctgacctcaggcgatctgcccacctcggcctctcaaagtgctgggattacaggcgtgaatcaccgcgcctggccaccaaccatgccaagctgatttttaaaaatattttggagagatgggggtctcactctgttgtctgggctggccttgaactctcaggctcaagcaactcagcctcccaaagtgctgggattaaaggcatgagccacagtgcccggtctgaagcacaggtgttttaaaggaaacctacagagcgttactcaaaaggaaatgaccattgtccaacgtcggggatgaagcagccattggtcggcgcgcacacgtccaggagtgcagggatgcaaaggcccgcaggtgggggaggtaggcggctcacacgagcccctctccgccccgccggccccgcttcttctcccctgcgccctcctctccctcgccaggtccccgttgcctcttccggaagcgggcccccagccggtgtctgggcggcaggagatccatgcccaggaccttgtgggtctgccggaaggccagcattcgcagggcgtgctgcggggcacacacagcctgtcaggacccccgcccgctctgctccccgagtgctggggacacagaggggctggtgtctgtggccaccagcagatgggccaggcctatcctgtatccctcgagatagcccccggccccccgccgctttcttttttgagacacagtctcgctctgtcacccaggctggagtgcagtggcgcgatctcagctcattgcaaccaccgcctcccaggttcaagtgattctcctgcctcagcctcccaagtagctgggattacaggcgtgtgccaccacgcccagctaattttgtatttttagtagagacagggtttcaccatgttggccaggctggtctcgaactcctgaccttgtgatccgcccgcctcggcttcccaaagtgctgggatgacaggcgtgagccacccggcccggccgacaccgcttcttacgactgcggagcttgggtcactgcagggcctgaggaattttcgcgtggtgccggctgaccacaaggactgtcccaggaggcccccccgctccactgaccaccagctctttccgcctcactggagggaccccacatcctgcactgcaagccattccagtgatcccattcaaggcaaaattcagaaacgtcagacccgatgcggtttggttttggtgctgctaggagatttttcttataaacaaatttgcaaacaaggtaaccacaggtgagggctgggcaggcggagctgtcggccacggctgggcttctaggaccatggtcagtggtgtgggggaggacggtccctgccaatgagacctgaggtctgggcgtcattaacggtggtggctttggctctcagctgctggccccacgccaccatgccaggctggccctgtccctgtgcgtggtcctgccacccacgggccgccctcctgttcctgtacatctcagtgggagggagagaaggggaaacccaggccatttcggggaacactgcacagctgcaagccggagctggggcctgggtgtcacccttgccgtgacttgaccctcctacctgggcgctggcggtcacgtcttcccgctcttggagggtcatgggctcgagggcatctgtctggtctctctcgcagggatcctggagcccgggcccgtctttgtgacggggagtgggaacagcaaagaaggcgagaatgccctcgtgaaagacggtgacagggccgtccctcgacaccgtggggcctcaggggcccgtgcatggggctatacttgcagccgtggcacctctgaccctcaggcctctctcagcaggttcagggtctcacccgggcacatgggggagtcctcctggcccctcaaagcctgttgggctgccagcatctcctgggcgttgtgtgtgtgttcgtgcctgtgtgcacccatgcatatacacatacgctgacgtgtgtgtccatgcgtgcccatgtgcacgtgtgtgtccgtgtgtgcacgtgtgtgctcattggcgtatgtgcatgtgtgcctgtgtgtgcatgtgtgcccgtgtgtgcacccatgtcggtgtgtgcttgtgcatgcacccatgtgtgtccatgcatgcacggtgtgcccgtgtgtgtgtgcatgtgtgcctgtgcatgcatgtccatgtgtgtgcccatgcgtatgcatgtgcgcctgtgtgtgcaagcatgtccacgtgtgcctgtatgtgcactcattccatgtgtgtgcccgtgtgtgtgcatgcatgtgcctgtgtgtgtgcatgtgtgcccgtgtgcactcatgtatgtgtatatgcccatgtgtgcatgcatgtctgtgtgtgcatgcactcatgtctgtgtgtgcccgtgcgtgcttgtgtgcccgtgtgtgcaggtacatccatgtgtgcacctgtatgtgcactcatgtccttgtgtgcccgtgcgtgtgcgtgcatgtgtgcccgtgtgtgcaagtacatccatgtgtgcctgtatgtgtgctcatatccatatgtgtgcccgtgcgtatgtgtgcccgtgtgtgcaagtatgtccatgtgtgtgcctgtgcgtgtgcatgcacgtgcctgtgtatgtgcgtgtgtgcccgtgcgagtgcgtgcgtgtgcccgtgtgtgcaagtatgtgcgtgtgtgcgtgtgcatgcctacacgtgtgctttacatgatggcccaggcaatgggccgaaagcttcatgctcccttttcacttgctatcatcctatgtcactaaaaatgactcgaaaacacccttttccgtatctggccgccaccctctcacatgtgtgtcctggcgcgttctcttccctctgctggtgtagaacgcattgtgctgggcagctctgcgccctctgtcctctgagctcctggctgttccctctggataatctttggaggacaggcaccggggtggatttgtgccagagtggctctgtgccggggtggctctgtgccgccgccggtgggcgtggccaccagagaacataactgttgtctcctgggtgggggctgagccctcccttccgggacctgcgtgtctgtgccctgcgtgcagggtggtgtcctccatgaccgcggccctgtctgccttcctgctgggagcatgtgtgtgttgtgggccgcactcctgcctgggctggacacttcctctgtgtctgtgaccccagctctctgtgccatggccacgggccctggtctctgcgatttgccgcccacctcctgggccctccggcccagcgactgacctgtcaggagcgtccctgtggccacgcactccaggactcgcctgactgcatccccggggcccaggggcccagccgcactgctcacagccttctccaccagcagctccatggcctggtggggacagaagagcagttgctgtgttttgggcgcgcggcagcccctgcctgcccgggaggtcctggggtccctgggacaggaggcccccctcagctctttctctaactcccaccacccactgaacttccgccgaggagggctgcccgtggcagggctctgccacctcctggcacggccacaggctggtttctttcttttctgagagcggagtctcgctctattgcccaggctggagtgcagtggcacgatctcagctcactgcaacctctgcttccccggttcaagcgattctcctgcctcagcctcccatactggctggtttcttcacccctctgagcctcagtttccccggccggtccacagtgacatcacatgccagtgtcaggtgcactgtccaccacgtggggcccgcctcagctgaggggaaggagccaccctatcccaccacgtcccccctgtggccagttcccgagggcacgaggggacaggggcattgctggcctcccacagcactgtgtgggtgcctctacagtcacagcaggaaaacaggtctcagggaacacaggctttctccacgtcaggacagccgcacaccggtcacccagcacggaggctactgtgacctcctcccaggagaggagaggacgtttcccctaaacaatgagtgtgaaaggtccggcgcggtggctcatgcctgtaatcccagcactttgggaggctgaggcgggcagatcacttgaggtcaggagttcgagaccatcctggccaacatggcgaaaccccatctctactaaaaatacaaaaattagccaggcgtggtggtgcgtgcctgtaatcccagctactcgggaggctgaggcaggagaatcgcttgagcccaggaggcagaagttgcagtgagctaagatttcgccactgcactccagcctgggcaacaagagcgagactccatctcaaaaaaatgattttaaaaaaaagtaaaaaagagacttaatctctaccaaaccaaacagaacaaaacaaacaaacgcctctgtaccatgctgcattctggacactgggcagtgggtgggtgtggatgaggcacacaggcccagtgggagggaccacgggcaagacaccactccagcacgggatgggggacgccactccagcatgagatgggggacgcccgcagggcgggggggaggccgggtgtggatggctggcttgtggctggtggagaaggtgtggggactgggtgggttcccggggtctccgtggggagcgtgggcatggggcgtgctctgtgaaccttgtggtgaggggattctgtttcttctcttccctcccctttctaccaggatgggctggggggtggtgtttgagccacagggggtctcccctccagagcaggtgggtctgggctgggtcacccagaggccggtgtgcagccaggatggggagtccggcttccgcccctctgcctgggcccctctgccccggtgccacgaagtcgggcagacacctcacatttccctggccagtcccacatttgcatgtgaggttctgggttttgaatagtggcagtcaaatgaggctgtggagagggccgtctcccccgcaaggggacctcagggactcccacggcctctcctgagtactaggtctcccgccggctccttcgagggaaaaggtctgtctctcagcctgggcctgtcagggccatggaggcccttgggggtcccagtggagggccgggccgccaggcactgccttacccaggctggcagggccccccaggtgggcacacgccggcagaggtccctcaggaccctgatgacgatcacgcatggctgcaggccgctggctcgagccttcgggggagaagcacacggttagctttcaggggctcacgtggccacacggcatggcgccgggctctgtcgtgagcgtgaaccccagggaggataatagggagcctggcgggcctcgaaggtggcgggtggaaacagagtccactcccacatgagcccggtgccaccaggctgttgagtggccacgagacggcagcgtccccacccccagggcagcacccactccttccacacttcccgaccccatcagccaggagccagcgttggttgtcaagtcagcactcggccaggaagctgatggcaggcgtcccggtctgcgctgggagcccacggggctgaggcggccgcgccgggttgacctggtgcctctgagctacgttcctcaaagtcacccctctccccctgctccacccctgcccccctgacctgaaaccacctggcatgacggagggcggccagggactcgaggcacttcttggggctcaggacatcacctgcatcagcctgaggctcctccacaccttctagaagaaaaacctcgaggtgtgcggggaaggtgcctcgtcccgctctgctgccgacggggtgaggggctcagtttgggcccctcgacgcttttttttttttgagacacagtttcactgtgtcacccaggctggagtgcagtggcatgatcttggctcactgcaacctctgtctccggggttcaagtgattctcctgcctcagccttccaagtagctgggattacaggtgcccgccaccacatctggctaatttttgtatttttagtagagacggggtttccccatgttggccaggctggtcttgaactcttgacctcaggtgatcctcccacctcagcctcccaaagtgctgggattacaggcgtgagccaccgtgcccggtggggattttattttttacgtatttagagacagggtctcgctctgtggcccaggctggagtgcagtggtgtgactggagctcactgcaacctcgaactcctgggctcacgtgatcctcctgcctcagcctcctgagtagctgggactgcaggcgtgcaccaccacacccagctaatatttatttatttatttatttgtttgtttgtgttgagatggagtctcactctgttgcccaggctagaatgcagtggcgcaatcttggctcactgcaacctccgcctctcgggttcaagtgattttcctgcctcaacctcctgagtagctgggattaccggcgcacgccaccacgcccagctaatttttatatttttagtagagacagcgtttcaccgtgttggccaggctgatctcgaacccctcacctcaggtgatccgccggccttggcctcccaaagtgctaggattacaggcgtgagccaccgcgcctggccaaatttttttgttttttttataaatggggtctcactaccttgcccaggctggtctcgaatttctgggctcaagcaatcctcccacttggacctccaaaagtgctgggattagagaggtgggccgctgtgcccgacctaaaaagggagttttagaagctcacctccccaccacgctgggcctggggagaggaagcgggggcaggaaaaggccgacaggaagtgcactttcctggggggcggctcacggggctcttctgtcactgatctgtcctcacagaaggatttccgctcacttcatcacccacccgagccaggaaagagccactgtctagtggccgccaacccttaacccgcccccacaaccgcgccactccccagcctcctccgcatttgtgtcacagccttcagctagcgccaaaagccactctcttccccacactgtacttagtttttagatgactatttgtgaggactgatcgtgactttccatttaatgattcaaggctcttattaaaaaacaaaacaaaacacttaagctttaaaaaacaaattgggccaggcatggtggctcatgcctgtaatcccagcactttgggaggccgaggtgggtggatcacctgaagtcaggagttcgagaccaacctggccaacctggtaaaaccctgtctctactaaaaatacaaaaaaattaactgggtatagtggcgcacacctgtagtcccagctactcggaggctgaggcaggagaatcgcttgaacccaggcggcggaagttgcagtgagctgagattgcgccattgcactccagcctgggcaacagagcgagactctgtctcaaaaaacaaacaaacaaaaaataccaaatcgattgaaagagaaacatcagtaggtcatggccctcagttatgaccaaaaaagattacgaagggggtaaaagatgataggagtttggaaaactgccctagagactgttctggaagattccacagctggctgagacttcgggagcacagacgtgcagtgtgttactgatgcctgtcttcgctgtggccgctggccaagaccctcgctgcccctagcctggcccggcccctcacccaccctcccaggcctggcaggtctggctttaagacccccgattccctacattcctaatcagtggcactgggactgtggtgactgatggacagagtcaaactgagcttctgccgtgacccaggggaaatggctcagacctgtcctttgccgccagggctggtgtcaccagggcctgagaagcaggtgccagccctgggtaagggcaagggaggtgacacggtgtcgcttgcccgagcaaggcccctgcagccaggctctgagcccatctgatgctgtcaccgactcgccgcctctgctgcccggagacccagctcttgtgtgacccatggaatcctcagggggacagcagtgctggagcgtggctgctgtggcatttcctgctcagggcagaggcggacgctgccccaggcctgggtgtggggagcgccctggggaagcgtgagggggacagtggttggaaggaagggctgggccgcacctgggtctgtggaggggtcctcccgcatcagaggtgaggtgacagatatggtgacctgcatcctgggctcctcacaggaggagatgacaatgttggcttcagggtcggaggagacctcatactcatcctcggtcaccatctgggaggggtaaatacaacacaaggccaccttactgcagcccagattcatgtgtaaatcagccaggatgtggttggtgtgtgtaaattaatcccgtcgggcctcccacacttgctgcctgggtgccgggccctgtgccctgtgtctggaacctccaagtgaccaagacacagccgcagccctccaggagtgcacacatgtagagatatgtacagacaacagatcatgtgatgcaaggagcctccatatgtaaagaatacctgtaattcaataacaagaagaccagcaatccaataaaaaaattggtgagtgaaataacagatacctggcagaaaaagaaacacaaatggccctttttacacagtgacacacattaccccatagtcagggaggagtaaactaaaaccataatgagacgccaccatctcctgtgagcaggacatagctcaagaggtctgtgtcacagtctggtcttcctgtccatggtcatcaccctccatgaggcctgtgctcacacctgagcctggcctcccacctgaaacgcacctctctccccatcctccatcccttcccttctcagggcctccctgctgcaaggcagcccccagggggctccgttgacattactggggtggatgttgtcagcttccccacagccttatacattctcatggggctcagttattgtctttgccaccaggctgcaagttttccagaaagcaggggctgtatctatcatgttgtggccactgtcatgttgtaggtgtgcaggaaatgtgagatgcaattattgaagtcagagcatgtcactcccctgctcaaaaccctccagcctccccacttccctaagaatgcaatcctacctcctggtacggccttcaggcctggcttgatctaggtgccccctcattccctcgtgcccacccctccttgctctgggcctcctgctttttggcctctgcaggtgctggtcattctatggggaacactgtctccccgaccaggcactgcccatccactgggcatccagtgcccactggaaaagtcaaaggagtaaggctgagttttcccagggatggtgacagacgctcaggaagaaggaacgactctggggactgatttttcatttttctttctttctttttttttaagacagagtcttactctgtggcccaggctagagtgcagtggcactatctctgctcactgcaacctctgcctccagggctcaaatggttcccctccctcagcctcctgagtagctgggattacaggcgcccaccaccatgcccggctaatttttgtatttttagtacagatggggttttactatgatggccaagctggtctcgaactccggacctcaggtgatccacctgccttggcctcccaaagtgttgggattacaggcatgagccaccacgccaggcccgatttttctttttaaacctaagatgatcaatgtaaattcttcagtatgagaagagtatatgaaaattctctagaggaaaaaaattcagttgacatttcacagccctaaaattgaaattgggtttttgcttttcttacggcttcctagtcgccattgctgcgaatgttttctgtgcagctttcatcatcatttactctttttgaatttcttttgagactgagttttgctctgttgcccgggctggagtgcagtagtgaatcacagctcactgaagcctcgaactcttgggctcaagggattctcccgcttcagctccctgagtagctgggaccacaggtacatgccgccatgctcagctaattttttttttttttttttttagacggagtctcgctctgtcgcccaggctggagtgcagtggcgcgatctcggctcactgcaacctctgcctcccgggttcatgccattctcctgcctcagcctcccgagtagctgagactacaggcgcccgccaccacgcctggctaattttttttttgtatttttagtagagacggggtttcaccgtgttagccaggatggtctcgatctgctgacctcgtgatctgcccatctcagcctcccaaagtgctgggattacaggtgtgagccaccccggctggcccatgctcagctaatttttaagttttttgcagatacaggttctcactatgttgcccaggctggtctcaaactcctggactcgagtgatcctcctgcctcagcctctcaaagtgctgggatttcaggtgtgagccaccatgcctggctaacaaactggttggtttctaacagcgatgcttcttcttgtatcttttttttttttttttttttgagacccagtctcgctctgtcgcccaggctggagggcagcagtgcaatctcagctcagtgcaacctctgcctccgggatttaagtgattctcccacttcagcctcccacatagctggaattacaggcacatgtcaccaggcctggctaatttctgtatttttagtagagacggtgtttcaccatgttggccaggctggtttcaaactcctgacctcaagcgatccacctgcctcagcctccctaagtgctgggattacggacgtgagccactgcgcctggcttaatgcttcttgtaccttaaagttgtgtagtaacaaaggtcccctgccatctaggagcgcaaggggctgcggggagagggctggcagccagacgccagaagcagcgatgagcagggccctgaccttacctggagctgccggggcagctgctgggcgatcctccgcagcaggctgtgcgtgggcttctcggagcagagcagagcgaggcgcacgttcctgtccccacgcaggaggaggcctttcgccaggatgcctactcgcatgacgcctttcaggacccgagtctggggggcaacgctgctgtggggacaaagccacagacgtgcgccatcagcggagagacgcggggtaccccagctgcctccctcctgagctacggggaccctgcaagttacagagcctctctgtgcctcggcatcctcatccatgaaatgggaccaggccgctctgtcggaggcgcttgcgggatgaaatgagacaccgtgagatcgatctcggaggtgctgtcaccgggcatgcctcggagtagccgggacgcgtggccaaacccacattttccttccttgtgagcaaacgctaagccccaggcccgccccgcgaggtctggtggctcccgcgttcacggactctgtcaccctgttgtttcggctccacatgggttccagagaggacagaaagcaaggctgctttctgctcttgcttcacgggggttaagaaaattcacaaacctaggccgggcgcagtggctcacgcctgtaatcccagcactttgggaggccgaggtgggcagatcacttgaggtcaggagtttgagaccagcctgaccaacatggcgaaaacccatctctaataaaaatataagaattagccaggcatggtggcgggtgcctgtaatctcagctacttgggaggctgaggcaggagaatcgcttgaacccaggagatggaggttgcagtgagccgagattgtgtcactgaactccagtttgggagacagagcaagactccatctcaaaataatgataataataataataataataataataataataataataattagctgggtgtggtggtacattcctgtagttccagtacttggaaggctgaggcaggagaatcacttgaacctgggaggcagaggttgctgtgagccgagatcgcaccactgcactccagcctgggcaacagagcaagactcagtctcaaaaaagaaaaaaaaaaaaaaaaaaggagagggcagcttcctgggcgctccttgtattgggacactttgcaacccacaggtgcaaggctcacatttcctatatggagctctgtgctccagcaaaaggaagccctcaggccaagtggatcagccagacacaaaaggccacacggtgtgcgaccccatttctatgaactgtccagcacaggccaatccacagagacagggcgggcacgcatgggtgcacgaaacaaaaagaggagtttgcttaattgggacagagcttctgtttgggaagatgagacagctgtggagatggacaggggtgtagtttgcacgtgtgaacgtgcttcatgcccctgaactgtgcacttagacaggttaaaatgctcagtgttgtgtgatgtggattttaccacaatagagaagcattcaaagaggaaagtgaacccgtaatcccggcactttgggaggccgaggtgggaggatcgcttgagcccgggagttcaagaccagcctggctaacatagcgagacctctccctgctacaaagagttaacaattagctgggtgtggtggtgggcgcctgcagtcccagctactcgggaggctgaggcgggaggacagcttgagcccgggggtctgagggtcagtgagctctgatcgcgccattgccctccagcctgggtaacagagtgagatctgtttcttaaaaaacaaaacaaacaaaaaaacaacaacaacaaacagcagctgccagagcaggaaaggactttgaaaaaaggtaactcccgctcagatgagttatctccatggcaattacttagacgacgtggggactttctcacttcctaagaatcacaggggttgggagctgattcacacgggcactcagtgacatgaactactctgattactcagtcactccccaaggcggagaagtccgtcagaatcacgctcagcttttccttttgccaatgaggaaactgaggtttacagagactgtcagtcccttgtgaactatttttagatgcgccttcaatagcaaaagggaatgctaaggcattagaacagcacggatcacccgctgcaaaccagcctcgttcagtgccgagaagctccagctctgagacctggggaacttcctactcctggggctggaaagctgccgcgggccaccgacggctccaggcccatcagagctaggggttcctgcagggtctcgtcccgaggagctgacctctgtcctggctgagagccgggccctggggaaggggatctccaatgacctgcgcttgtcaccctcttcctctcggcggccccggtcctcctcggccagtgtgtcggacaccagcttgagggcccgctctgcgtgggacacggccctctgcacggccaggagctcctgctccgtggggtagatggtggcgtgcttgcacatgacgtgccggtcgtcgctggacgccggccgccgcccgggctgtggggagaggccgcacgtgtcaagggtggtctgtggggacccttggggagtgctgggcaggcgggcaggtgggggcaggtggccgtggccagccaggttacgaggcggcagcgtggccaggtgagaatccagtgcacacagagagccccggggtggggaacagggaagtacctcgggctgccccgatggctgcaggaagctcgggtctgagtgaaggaatggggggaaactccgccacctttggccatattcttaaatttccagaccagaggcttttgagtcagcctgggaaccctttctcacagcaaggtgcaaatccgaggttcccattgaggccgggcgcggtggctcacgcctgtaatcccagcacttagggaggccgaggcgggcggatcacctgaggtcaggagttccaggccagcctggccaacatggtgaaaccctgcctctactaaaaacacaagagagcccggcgtggtggcgggcgcccatagtcctggctactcaggaggctgaggcatgagaatcgcttaaaccctggaggcagaggttgcagtgaggccacgattgcaccgctacactccagcctgggcgacagagtgagactctgtctcaaaaaaaaatagttcccatcgaacctgggggctcgggctgcggggacaggtgcttctgagaagagacagtagtagccacagaggcatgaggctccccaagggaggcgaccacccggggctccaggaagcagaagggatctctgtggccagtggcaggggctggggtgctggggctcccatctgtggagtgaggaggcctgggccatggagccccatcccctgagtactatgtgggagttggggggaggccgggtcctcccgaggaggtgtccgctgctccggggagtgtgaggtcgcccgcgtttgcacacagaggaaactgtacctacctggagtggggcgctggcgggtgactccggcctgcccatgagcagaggctgggcccagtcgggcggcgcgtggggcggcacgtcctggggtggctcctcctccagccgcctgcaggaccgagacgtgacagagcatggtcaggccagcagtggccctaagctgggggcaagtcagaaacactggggccttatgctcccagcaaggaaggaagggccaaagctcttgctggggctccactgcactgcatgggtgcctgctgtatgcacagaagactgaggctgggaaggctggtgtggggggcagccaaagacaccccttaggcaaatgaggcccagcccgggcagccatggccttcaggaggtcctggttcccttcccaatgcagacctgctgctgctggacacaccagagtcagatgttacatcagaaaatgctctaggatggacacaggggacactgggaatgaggggacgctaggggatcagggggacacaggagactccaggggtcaaggggactcaggggataccaagggtaaggggacacagggtcatcaggggtcaggagacacaggaacaccaggggacagagggacaccaggggtcagggggactccaggggtcaggggtcacatggcacactagaggtcgggggacacagggacaccgggggtcgggggacacagggacactagaggtcgggggacacagggacactagaggtcgggggacacagggacaccgggggtcgggggacacagggacactagaggtcggtggacacagggacactagaggtcgggggacacagggacactagaggtcggggacacagggacaccgggggtcgggggacacaggtcacaaggcacctctgcagccgtgtggtccagcgagttggccggcagtgtccctgcgtctacggaggccctggagcccacgtgtcaggtccgcacgccactgtgcccttgcccgtctgctctggaaccctctcacgctcccacaccaggacgtgcccactgcccgggcacccgtctccccccactgctcgagagctcacacggaggagctccgtaatctgcagcagtgggcgtctaggttccacgctggacctgccctccctcaccaggcccccttgccaagacccgcagccgggcacctcctctccgcgtgccagcgccgcagctgctccagccgctcctccgccaggtgccgctgcttcctcatgcgctcctccaggaccttccgagcccggctgctgggctccgtggcaatgggaaggtccgggttcactttcttctggaaaggacaggcaaggctctgagagtagggaccttgctttagacagggatgccaggaggatcttggggtgcagggagaggcccagagactagaactgttgggctgaaaaatctcccaaagcctttttttttttttttttttttttttcgagacagagtcttgctcttgtctcccaggctggagtgcaatggtgtgacctcggctcactgcaacctccgcctcccgggttcaagcgattctcctgcctcagcctcccgagtagctgggattacaggtgcgcaccaccacacctggctaatttttgtatttttagtaaagatttcactatgttggccaggctggtctcgaactcctgacctcaaatgatccacccaacttggcctcccaaagtgctgggatgatagacgtgagacaccgcgcccggccgaagatacacttttgagacgaggaccaagacgttgaaaacccagaaaatcacccctccctcttaagttcgtcggatcacacgcgcggaagaggcccgaccacaggcctcccagcgcccgccgggccctagcacagcccggacgggtgtcggagctccccctgctggacgcacccggtactgcagccggtgccgccgccccctcacgtgcaggtccttcgcgttaaggtcgttgaaactgcactcgcacagcttgcagtggaagcgaagcactcgcccttcgtcgctgaacacctgagacacagaacagccgcacgcgcaccaggcacgaggcggggtgggatgtgagatgctaccgctgccaggtcgcggcggagccttcctccttgctgctcattttatttatgtatgtctttttagagacagcgtcttgctgtgtcacccaagctggagtggagtacagtggctcggtcttggctcactgcagcctcaaactcctgggctcaagcgatcctcccacctcagcctcccgagtagctgggaccacaggcacacgccaccatgggaggctggaggattgcttgagcccaagagttcaagaccagcctggtcaacatagcgagacccccatctctacaaaaaaaataaaaaatacaaaaattagctgggagtggtggctcatgcctgtagtcccagctactcaggagactgaggtgggaggattgattgagcccagaagtttgaggttgcagtgagccatgatggcaccactgtgctccagcctcggtgacacagcaagaccctttctcttaaaagaatcccaggcctacaggcaaggcagaggaaacccagccctgcctctttggcacgcacaaggccaaccggggtctgaactgccgctggcctgggagctggcagacctggcccaggagctcggctccactgctcaccagcctgaccttggcaggtcccagggtcccgcaggcccaggaaaggggctagacagaagggcttccaacctcccggggagctttctactgcccagatcccttccaccttccagacagacggctccgcagggtcccctgttgggaatgcctcggcctgtctctggccctcacggggccatattcatttcctgctgataccaaaatccggcacccaaagtgtcaagcgggtctgcacggggttttggtccatggaggtctggcctgtgcagctcaggaacggggatgggtctgtaaatctcgctgggagaagccgggtgaggtctcgaagcctgatccatgggaaggtccttccctgaccggggcaccaggacttgacagcctcgacttacctcctccacatattccgggcccaccggctgcgcatcagagcagcccgcgggagcttcctttgagcctccttgggtaggtgctccgggaccctctaatttaggttgggctggtttcccccactggggtctgcagcctgctgcctgtggctcaggaggccctgaggggaaaaaccatgtcacttataccctgttccaggagaaagcactgcagctgcagacccgccaggcggcatggggtggagagccacccagactgcaggctgtgccatccccctccctcctgtgatgtcagggggaatggccccggacagcaacctcgctctccctttcatgcctgcgtgtgacccagccaagaaaccgaggccaatttcaatccatccggggagaagccctggttttaggccctcgcttgaggaacccaccgacagcacaaaatccacagttaatagaccatgaagtatcaggcggaccaaggctcgcacttaacctacccccgttaggcgaaatgatggagcctcggggggagacaaatatctttgttataagaatgacttgatggtttgatcttcaaaatcatgttgctattcaagaatcaacgctgctgaggctaaaaatagaatgtggctccctcgacccctgcccacgcacagcacggtggtccagggcagagactcttagacagacccgggttccaattccacctccaccgtttacggcttttccatctacacattgggactggtgacaacattgactcaaatgagttgtgggctgggcacagtggctcatgcctgtaaacccagtgctgcgggaggccgagttgggaggatcgcttaagcctaggagtttccgaccagccccagcaacatagcagaaccccacctctacaaaaaaaaatacaaaaagtagtgggatgtggtggtgcacacctgtagtcccagttactcaggaggctgagctgggaggatcgcttgagcccaggaggtggaggctgcagtgagctatgattgcacctctgcactccagcccgggtgacacagtgagactctgtctcaaaaacaaaacaaaacaaaccacgaaaaaagagttgtcgtggaggtaaagcgaagcaatgcacacaaagcagtgagcagacgcctggcatgtaatcctagttaacgcgggtcagctctgacagctggggctttgcacgcagggaaggtagggtcacaggcagaggggtgtgaggattccaccttcatttcctggtacccatataactctgattctgagcccaatttgttcaccgtgagcaccagggcatgcaggggagcacagtggaggtggcagcccagggaaccctgtaggtgcagggtgagggcttccagagaaccccagcacccggcaccaggccagattctaccagaagaggccgggcgcagtggcttacgcctgtgatcccagcactttggaatgccgaggctggtggatcacttgaggtcaggagttcgagaccagcctggccaacatggtgaaaccctgtctctacgaaaaatacaaaaattagccgggcgtggtggtgcatgcctatagtcccagctactcaggaggctgaggcaggagaatcgcttgaacccaggaggcagaggttgcagtgagctgagatcgcaccactgcactccagcctggaggacagagcgaggctccatctcaaaccaaaacaaaacaaaaaaactctacaggaagaaatggcattaccattttattggttctgccagcactctctggaaatggtctcaaagggtctccaaggttcagggcggtgtgggccagtgggaggccatcttgctctgcaggaataagggagagacggcaccagccagcccctcaccaccccccgggaagacatgacgaaaatcgactggatggtagattttctcacgaaactttcactaggcggccagggctctggtgggtacacgaacacgcatacagacacacgtaccctcgcataaggccttcgaggccacgggtctcttggccagcgctggcctgctcgaggcacacacgctggggccagtgggggacgtgggcttggcctctgccccgggggggctctctgtggccagtgcaggctcgagggtgggaatgggcttccccagtttggcgtgcagcttgaagacctgcaacagacagagccgggctcccgcgtgagggccgctcccagcctgatggcctttttcaagaggcaggaagggcctccacgggcgtgcagcgcgagtgtgggctggccggtcccagggacccccctctcttctctcctcctgctctctggataacacccactccagaaggcccttcccaggtggcctcctgccttgcacacgtgcttgtgacttctctagcacggtgacactcctctagtgtgtgagcacgtggctcaccggctcacacggacgctcttcctcctcctccaccacgtgggctgccaggtggggccgtttctcagcctcccaagccccagcctagtgctccctgactgcccgggactcagcatgtgtggatggatggtgggtgtgcacgtgtccctggacggacacccacgttctgcacgcacgtgtgcacatggtcacgtccgtattctggccgtgccccattctcagcacctctaggtacaaggtgtttctggcaaaggttccgtgtgcacagggccactgtgtgtgtgctggggaccatctcagacacacttcccagctctgtctctgacacgctgtaccctggtacaagacctgccctgtaccccccaaccccacaacgggcagcagggcctgcctgacccccagactgagccccagcctgtgggggtgacacctgcagctctgccccaccggcccctagctctccggtccccaggccaagtctccttcccccgtttctctgccccgctccttccctcctccatgcctccctgctcattcctctttcccctgtgggttcacacgggccctcagcaagctgtcctgagccgagccagggaatgaggccctggatgagcctccaggcagctgggggagagaagccaggtcctcagccaggcctctcagggtggctcagcctgacagcccgggctacagcacaagccagctgtcccctccctgctctcaggtggggactccatcccctccccgccgaacatgacgaaacccaggcctcttttttttttcttttggcgacagagccttgctctgtcgcccaggctggagtgcggtggcgagatctcagctcactgcaacctccacctaccgggttcaagcaattctcctgccttagcctcctgagtagctgagattacaggcacgcacccaccacgcccggctaatttttgtatttttcagtagagacggggtttcaccatgttggccaggctggtctcaggctcccaacctcatgcgatccactcgcctcggcctcccaaagtgccgggattacaggcgtgaggcaccacgcccggcctgacccagaccttactaaggcctcaggagaacagtgatactacagcagggagtgtgaagagcaagacctcaaagggaacacagcattgggtctcatcacagggcaagccctgtctgtcaccacgcccgaatgccaagctttcttggaagtccgggtgtgagtgtctcggccacttcatgtttttgtgcaatgagcaggaaccctttttataagtggaaaggagtccccgcacggtggctcacgcctgtaatcccggcactttgggaggctgaggcgggcagatcacttgaggtcaggagttcgagaccagcctggccaacatggtgaaaccccgtctctactgaaaacacaaaaattagccgggtgcggtggcggatgcctgtgatcccagctactcaggaggctgaggcatgagaattgcttgaacccaggaggcagaggttgcagtgagccgagattgtgcccctgcatcccagcctggggaacaggacgagactttgtccccattaaaaaaaataataaaatgaaaactaaaataaaataactggaaaggagtttggatccttgaagatgaggacgcatgggcctgggcggctggcccttggggcgcgctccacttggggaggcttctcccagctccctctgatctccccaggtacctctgtgggtcccaagtgctgacctgggggccttctccccagggtggcagagcctgggccgggcggggccgtaccttctggtgcttggatccccggatgtgggccgcgtaggcgtccgccccggtgcaggacacggcgcacaggtcgcaatgcagctgcgcctgcaccccgcgcgggctcccgttgggctgcacgcctgtcttctgggccgcctccttctttctgtgcttctgccctcccagatgttcccggtaggtctgcggcaaggggtgagaggcagcctgggcgggggtttgcacactggccactgtcccctcccctgcaggcccccggcttagcgcgagggaactcggtggtaacagaggcccgctgtccccaaccctccattccctggtgccatggaggttccagtgtccctttatttttcttatttttattttttgagatggagtctcgctctgttgcccaggctggagtgcagtggcacgatctcagctcactgcaacctctgcctcctgggttcaagtgattctcccgcctcagcctcctaagtacctgggactacaggcgggtgccaccacacccggctaatttttgtatttttagtagagacggggtttcactctgttggccaagctggtctcgaactcctgacctcaagtatctacctgctttggcctcccaaagtgctgggatgacaggagcgcaccaccgcgcccagcctatcttcttactatagacgtctcaaattttttttttttttttcgagacagggtctcactctgtcacccaggctggagtgcagtggcgtgatctcagctcactgcaacctccacctcctgggttcaagcgattctcccgcctcagcctcccaagtagctgggactacaggtgcacaccaccacgcgtagctaattcaagtgtccctttatgaagcccacgtaacaaacccacaggctcagactgctagacataaggtttcttccttcttctggaattcaaggagtttctttggaaagcatgctccatgcatcacacattccttttgggggctgctgtatacagaaaattctgacttcagaattcaacgtcagaaaccaagcaagggcacctgctgcccgaaggatagtcacgtacacttccatcttaggaaactgctaatagacacaggggctccacccgggggaagccaccgtgagtcacaggcctacgcatccggtactactgggcccaaaatatctgattgcgtctggggaagcgacagccaagcccttaggcagaatcctgggtgtgctgcttgaaatcctcaaatgaagccggccacagacaagacgtggcaggagggccacgaaaccaacacgccctgacaatgccaagaataaacattctgcagactgaaaaatgcccctgaaaatactggggcacagtgggcactgccccgtcacctgcaggccaccggcttggcacacaagaactcagagacattgtctggttttagggaagaaaaataggacgtgggagaggcatacattttactgtatgcatgctctctggaacttaggaatctttttttttttttttttaagacggagtcttgctctgttgcccaggctggagtgcagtggcgcgatctcagctcactgcagccgccgcctcccaggttcacgccattctcctgcctcagcctcccaagtagctgggactacaggcgtctgccaccacgcctggctaatttttgtatttttagtagagacggggtttcaccatgttggccaggctggtgttgaactcctgacctcaggcgatcctcccacctcagcctcccaaagtgctgggattacaggtgtgagctaccacgcccagcctggaatttagcagtcttgaacctcataaatatattacctaagcaatagaataaatacgcatccctgtgcacacatactaacttagaaagagagactgcctgtggaatagagaagactctggaaggatacacaccaagatgctaccgctaaatcatttcagggtggagggattatgggggactataggtaggtttgtgtgtgtgtgtgtgtgtgtgtgtgttttgttgttgttgttgttgttggtttttggggggttttgtttttttgtggacaaagggtctcgccctgtcgcccaggctggggtgcagtagcgtgatcatagctcactgcagccttggactcctgggctcaaacgatcctcccacctcagccttcaaagtggccaggactataggtgcgtaccaccatgcccagctaatttttaaattttttttagagacagggtttcacccatgttgcccaggctggtctcgaactcctgggctcaagcgatctaccggcttcggcctcccaaggtgctgggattacaggcatgaggcactgcacccagccagtaggctgtctttgtgcacttttggcgtatactgcagtaattagccacgtgggcttcaacacatcttggtttgatttctgcctgggtcactaaaactgactctgagttcctcaaagtactgaccctttctgagcctctgggattttatctgccacacagagatggtagccacaaggcagatataaggattaaataacccacacgggcctggcgcagggactcagcttgtcatcctggcactatgggaggctgaggcagaagaattccttgagcttaggagttcgagaccagcctgggcaacatagtgagaccctgtatctacaaaaaaatttttttttaaatagccaggcatggtggtgtgcacctgtaatcccagctactcaggaggctgaggtaggaggatcgcttgggcccaggagttcgagactggacctgggcgacatagtgagaccccatctctattgaaaatttaaaaaattagctgggcatggtggttcgtacctgtctcagctacttggaaggctgaggggaggatcacttgaacccaggaggtggaggctgtagcgagctgtgattgtaccactgcaccctagcctgagcaacagagcgagactttgtctccaaaagaaactcaaacttctatgcgagcactctgcaaagaaggccggggtctctcccagcatgagacacagtggagagctgctggaggaaagagtctgagacagggaaagggtgatctggggcgggaggggtcctgagcagggaccggccccccatccccagctgggtcaggggtcctgataacggtgtcctgagccttctcacacctctccagagtctgcgattgcagactccgtgtctctccgcggtccagagcttcctttcagagtattaaaaacaaaagaagatcagggtgtgtgttttgcaaagacagagctctagggtctaattatctttccaggaattgagcccacgatctcagctgggtgatttgcaagctttaaaatctcaagctcgtgtgtttggtaaagattctttcacgtatgtcccaaacaagcactgccaagcacaagcacgcatgcacacacacacacgggcgcatgcacacacatacacatgcaggcatacatgcgcacacatacacacacgcacacacatgcacacacatacacacacgcttgcacacacaggcacatgcaggcacacatgcgcacacatacgtgcaagcacacatacatgcacactcacgtttgcacacacatatgcacacatatacacatgcataaacacacgcacacatacacactcacacttgcacacacacacaagcgcttgcacacacaggccatgcatacaacatgcaagttaacaccagaccttctttcagcaggcagcgaccctgaccaccccaccggcgcccacattcgggttcagacgttggggacagagaggtccctggggcctgcccatggcaggagggcgactgacctgggggccagcgcagctgatcttgcagatgtcgcagtagtgaagctggagctgcctgggccccgccttgggtctcggcagcttgctgggaagcggtggcttcgagtcggccctggggctgcttcctgagcctgcaggcgcgggcggcgggggcagctgctgcgggggtcccgggggaggcgggggctgcgctggaggatagaaagggctggcagcggagtacaccgacgcgtcatagttcgggtagcttggtgctgagcagcagagaaaacaatgagtcggggggagatgctgattccactgagttgaagtggggaccgacgggcagaccacctgggcaaggaacgctggtcttacccgtgtaggcggtgcaggtggggttgtaggagggcggggggtaggaggtcacgatggaagctgacgactcgggctggacgcctgtcgccgtggggtaggtgtatcccgaggacaaggtgctcgctggctgtccggactccactatgggcgcctgctgtgggggctgagcgtggctgtgactgccatgggggctgggctgcccgcaggcttcttgggtccctaggggacagggacaggccctctgcagagccaacccccaccccactgtccctcacctgcagatgggccctggactcaactggctggaacacgctagatgcttaagccaggaccagaggccagagccttgggccaggtgctggcagcgactcgcaggttaccttgtgcccacctctcctttccagagcccggcttctctctcctgccatgggggaggagggctgtgggtgccctagacaagctcctctgcatctccagctccatcacccacagagctcacctcctgccaccccgggaaagcttccttggaaaaaatgttagctgcattttcagtcctcactttccttcattcataggcccacacctggcagagatcccagggcccatctgagcagccagctctgaggctcacctgcaaatctaggatgtttttattatcattattattatttttttttttttgagtcggagtcttgctttgtcaccaggttggaatgcagtggcatgatctcggctcactgcaacctccaccttccaggttcaagtgattctcctgcctcagcctcccgaatagctgggattacaagcatgcgccaccctgcccggctaatttttctatttttagtagagatggggtttcaccatgttggccaggatggtctcgatcgcttgaccttgtgatccacccgcctctgcctcgcaaagtgctgggattacaggcgtgagctgctgcacccggcctttattttgttttttttttttattttttattttttagagacagggtcttgctctgctgcccaggctggagtgcagtggtgcgatcacagctcactgcagctcagttcctgggctcaggcgaacctcctacctcagcctcctgggtagctgggactacaggtgcacaccaccatgcctggctaatttttttgcattttttgtagagacgggggtcttactatgttgcccaggctggtctcgaactcctaggttcaagcaattctcccacctcgggcctcccaaagtgttgggattacaggcgtgagccaccgtgcccggcctctaggatggttaacatgtaactttcacggggtgcagtggctcacgcctgtaatcccagcactttgggaggccgaggcaggtggatcacctgatgtcaggagttcaagaccagcctggctaacatagtgaaaccccgtttctactaaaaatagaaaaaaattagccaggcatggtggcgcgtgcctgcagtcccagctacttgggaggctgaggcaggaggattgtttgaacctgggaggcagagggtgcagtgagctgagatcgcaccactgcactccagcctgggcaacagagtgagactccgtctcaaaaaaaaaaaaaaaaaagaaaagaaaagaaaagatgtaactttcaggccgggcatggtggctcacgcctgtaatcgcagcactttgggaggccaaggcgggcggatcacgaggtcaggagatggagaccatcctggctaatactgtgaaaccccgtctctactaaaaatacaaaaaattagccgggcgtggttgcaggcacttgtagtcccagctactcgggaggctgaggcaggagaatggctttaacctgggaggcgaagcttgcagtgagccgagatcgcaccactgcactccagcctgggcaacagagcgagactctgtctaaaaaaaaaaaaaagtaagtttcccaaggtttccctgtgctgcggggagcgtctcctcgttcccagccccgaccctgcagatggctcacctggctggccggagtctgcggctgtcatgcgcccagactggagggcagcagactggaagtacggcctgtcctcatagctcctggcagctgctgactgtccgtagctgtaactgtcctatgtgggggtttcggcaggagagagacagagaacggaggagagcagctcaggcggtgggtgcgacgcgccctgccacactgcactctgcacttagtccttcctgcagcgctggctcctaagcgtctgcccaggaccaggccctggcccggaggcagggggcagggggcagggggcagggggcagggggcgtggttgacacagcagctgtcatggagccgacactaatttccaagagttcgactgcaatttacaagaggacgcttggtgcggcaggagagggcgggtttgcagggagaagcccccgaggccttggcaaggaaatggagaggggaggaagagggtggggtcaggtgggtgctgagcttgagtgacagggtggcctctgatgccgttgaccgacacaatctggggacgaggtgcgggtggcagagctgggaaattggagcatggtcacgggggacatctttgcgacaccaagtgggaacacggtggctggatctgcagcctgagtgcctcggttgggaaggtgaggtcgtcagcacccaggtgcaccccacacaccacagactccctcttagaaggtaggaatctggagcgtggggaaggtggggtgagtcctggtctctctgggcccaggtggccgaggccatctgccctgaccagggaggggtcctgtaacccaggcgaccctcctcctccttcatagtcactgctgaagctgggacaaagctctgtgcgccgtcactgtccccactgccccgacgtggaggtacgcatgcggcctgtccccgagagcagtggattctttcggaagcgactctgccctgatttctccccaccacgggtacgcaatgccagcagaagggtcccgaaggaaggatcacggttaagaggcctgggagaaggagtagctgtgggaagcccaccgctctcacccatgcaaggcgacccacgtttcccggcaacgctggtcaaagaaaggactggatacctggtaggtagccatggtggtggccgtggggacgggctcctggggtcggctgccgtaggcgaagtcctggccggagtggggctggtatccaccgtaccctgccggggcagctgggggaaaggccgggttcacggcagggtccatcccaggagtgggttgtgcagtatagctggcccccacagtgggcaggggaagggtcggaggctgggcgctagaaccacaaacacacaccaaagccccaccaggttagagcgagttctcaggtgcactgagttgacggtgtcaattccagccaccactggacctgagctgccctgcttggtggagaccctcctaggagcccaggcacggccggaagcactttacacaaattaacaccgtctcacaacaacgctgtaatgctgggcctatcactgcacccaatttacagatgaagaaactgaggcactgtcagtggcagagctgggactcgaacccatctgacttccgctttgcagatgatctacttgtgtggcagggctttttctccatgtcaagattcttcaaagaaaattgaacttttttattttttgagacagggtctcgctctgttgcccaggatggagtgcagtggcacgatcttagctcactgcaacctccgcctcccaggttcaagcaattctcctgcctcagcctcccgagtagctgggactacaggcgcccaccaccacgcccagccttttttttttttttttgtatttttagtagagacaggatttcaccgtgttaactaggatggtctcaacctcctgacctcatgatctggccgcctcggcctcccaaagtgctgagattacaggtgtgagccaccacgcccggccagaaaattgaactttaacagcacagtgtctggccgggtgtggtagctcatgcctgtaatcccagcaccttgggaggccaaggcgggaggattgcttgagctcaggtgtttgagaccaacctggacaacataatgagaccttgtctccaccaaaattaaaaaaaaacaaacaattagcgagtgtgatagtacacgcctgcagtgccagctactcaggaggctgaggtgggaggatggcttgagcccaggaagtagaggctgcagtgagctatgatctcaccactgaactccagcctgagcaacagagtaagactctgtctcaaaacaaacaaaacaaaaaacagtacagctgtccctcactatctgcaagggttgagttccaggaccccctcagatgccaaaatccatggatgcttgagtccctgacatagaacgatatagtgtttgcatataacctaaacatatcatcccatatactgtaaatcatctctggattacttataatacctaatacaatgtaagcactatgccgatggctgttacattccattgtttagggaacaatgagaaggaaaaaccccatacatgttcagtacagatgcatttttttcccaaatattttccacccttggctggttgaatccatggatgcagtgcctatgaatgcggaaggccaaccgtattttctctttaaaaaaaaaatttgtttttgagaaagggtctcgctctgtcacccaggttgaagttcagtgctacgatcacagcccactgcagcctcaacttcccaagctcaagcaaccctgcctcagcctctcagtagctgagaacacaagtgtgaaaccatgcccagttaattctttaaaaaattttggtagaggtggggtctcactatgttgcccaggctctgactgtattttttttaacagaacaagtcagtccacctgagtattaaaataattactttagttagcactaaactaataactcttcactaaaaagaatgagtctttgtagggtttgcacagtgccgaggcctttgtccacatggcctcattcacccttcagaggacatgcggcaccatcgctccccacggtctagacgagaaaacctccaaggaggaccaggggctcatgtcaagtgcaggggagggttcagacccagatctttctgaccccaatgccccttgttcagctaaatatcagctacccagtagacagttctggagtctaaaagcccatttgccagggaaaagtatcagtaaagattttagcccaataccgctatggatatatattaaaaagtgaacctccaaccccataggggaaggagcaaggtatgagggtcattttggggaaaatggattagaaggcaaagaggctctacaccacctggcccccaaccgggccctgctgtagactcctgccagccaggtgagtcatccgcagtgtcagggccggggacaaggagacattctctgcggcacaggaaaacctcatgaaagttacagcttttttttattttttgagacagagtctcactctgtcacccaggttggagtgcagtggtgcaatctcggctcactgcaacctttgcctcctggcttcaagcattcattcctctagcattttcacacacttgtcctgagtgtccacatgctggacattcatgaacaccatgactgtggacacttgatggacaccatgacacagacacccgatgaacaccatgaccatgacactcgatgaacaccatgactgtgacactcgatgaacaccgtgactgtggaacttgatgaacaccatgactgtggaacttgatgaacaccatgactatgggacactcaaacaccatgaccatgacactcaatgaacaccgtgaccgtgacactcgatgaacaccatgaccgtgacactcgatgaacaccgtgaccgtgacacccaatgaacaccgtgaccatgacacttgatgaatgctgtgactgtggaacttgatgaacaccatgactatgggacacccgatgaacaccatgaccgtgacactcgatgaacactgtgaccgtgacactcaatgaacaccgtgaccatgacacttgatgaatgctgtgactgtggaacttgatgaacaccatgactatgggacacccgatggacaccttgactgtgacactcaaacaccatgactatggacactcgatgaacaccatgactgtgacactcaatgaacaccatgattgtgacatttgaacaccatgactacagacacctggtgaacaccatgactgtgacacacgatgaacatgactatgacacttgatgaacactatgactgtgacaatcaatggacaccatgactgtaacacacgatgaatgtgactgtgacacttgatgaacaccgtgactgtgacacacgatgaacaccatgaccgtgacacgtgatgaacaccatgaccgtgacacgcgatgaacaccgtgaccgtgacactcgatgaacaccgtgactgtgacacacaatgaacaccgtgactgtgacactcgatgaacaccatgaccgtgacacccgatgaacatcccgacaatacattcgatgaacaccgtgactactgacatttgatgaacactgtgactatggacactgaatgaacagcatgactacagacacctgatgaacactatgacagtggcagtactcctgttcccacactccctcccgtaggtggctatgaagaaaacagaactacagagtgagtgctatccaggctgcactgagcaccgaccgatgagccaaagagaggaaggtggaaggttccatacgggagctggggcagagcagagctggcctcagctgtacagcccttgctggagaccaccccagcccctcactctcctccctcctcgccagcatttctttgtcctcctggcagccagagaggggtcttttcaaagtacagccctaaccatgccatctcctgctcaaagccctcccaaggccctgccacagccacatcccaccgatcccatccccccgtgtctatggctcccgtccccgctgcctgcaagtggctgctcagtgacaccctgggacgagccctcctggagcccctgtggcctgatgctgatcagcctctgtcccctggtcctgctttttcttcttcctggcaccacccagtatacactgcacgtctgtccacaggccgtctcctccctggtcccgatgccctgagatgcaggaccagctgcagctgcccagctgtctcccggggccgcggcacgtggcatgcagcaggggctccatgcacatctagggaggtcaggcacatgtgctgaacggcgcttgtgttggggagggctctgtcagacacctcagcctgtttctccaagattctcctgaaggaccagaaatcggcagctctacagaaggatggacatgtcccctgggaccgcacacgctctgatctgcaccatcgtggggtgttttcatctctcccaggaaaagcagaagggccctatccataaagaagaaacattcagattccacagatcggccactgtgagatttgtgtttctcttctggaagtctcagagactttattggccaaaaagtcgattaggaaagtggtccaggccgggcacatggctcacacctgtcatcccagtactttgggaggccacggcaggcagattacccgaggtcaggagttcgagaccagcctggccaacatggtgaaaccccgtctctattaaaaatacaaaaactagcccagtgtggtggtgggtgcctgtagtcccagctactcaggaggctgaggcacgagaatcgctggaacccaggaggcggaggcggaggctgcagtgagccgagaccgctccattccactccagcctgggtgacagagcgggattctgtcaaaaaaaaaaaaaaaaaaaaaaaaaaaaaaaaaaaaaaaaaagcagaaagcagtgatcagtagctctcttaatctccttggggatgacacttcttttttatgacaaaatatttcaaacataaaaccacttaacaaacacatatcactgagatgggtaagtgctaatgtttggctgtatttgtgtcagagcttattgtttaaatacagagaattgaagcaccacctggatcctattcctttttcttcctccctagggttggtggctgtcttgtctaatcatgattcttagacttttaactacatatgtatgaaggttttgtttgtttgtttcagagacggggctcgctttgttgcccaggctggatggagtgcaatggcgcgatcacagttcactgcagcctctaactcctgggctccgtatgaatctgtatacaacacggtgttgtgtttttcagttacatgtgtgcaaaatgatgttcttattgtgtatgtcaccccgcaactcgcttctccaatgcccggcaaaccttgtctgaaatgtactgatacgagtccacacggttcactgattttaactccttcttccctacgctgtcctcctacctggacaaaggatcctctgcccaggccctgcatcttagagtttcatcgcccagtacagaagcagcagccacacgtggctgagctcttttttgtttgcttgttttacttttttttttttgagacagtcttgctctgtcgcccaggctggagtgaaatggtgtgatctcggctcacagcaacctctgcccctcgggttcaagcaattctcccacctcagcctcccaagtagctgggattataggcacctaccatcatgccgggctaatttttgtatttttgtagagacgaggtttcaccatgttggccaggctggtcttgaactcccaacctcaggtgatccacccgtctcagcctcccaaagtgttgggattacaggcatgagccactgtgcctggcctgattgttttagatatgaggtcttgctctgtcgctcaggctggagtgtagtgacgtgatcatagctcactgtagcctcgaaactcccaggctcaagtgatcctcctgcctcagcttcccaagaagctgggaccacaggcatgcaccatcacacaaggctaattttgtttttttggggtagagatggggtcttgctatgttgcccaggatgacctccaactcctggccttatgcgatcctcctgcttcagcctcccaaagtgctgggattacaggcctaagctaggctgagcacttaaaatatggcttgtgcagctgaggaacagaatgttaaattttaaaatttgtttcatttcagttaatttagattttgatggccatgcatggctggtggtgaccgggggccagcatggatctaggtcacgccggtcactgcacagatcacacacatacacacacacatgtgcatgagtgaagaagcacatggtgactcggtgccttgttcgctctaggttggccacggttcagggcccgggagacccaggccccatctctggctctacaccatgaaggcaaaaggcgaccacgtcagaatgcttgcaaagtttgaggattctgcctcccagctacagagagagctccaacgtggtttcagagtgcaaggagggtggaggaaagaccacccccttcgcaaaccctcctgttgggaacacggccggcaacgggtcttggagaggaggcctcactcctcggcagggccatggggccgtggccttcctcttctgtgggtctgatttgtggtctcagatgcacccatggatctgtgtgttcaaagcatggttctggcaactgaggagcattttgtaatatgcaggtgcggtggctcacccctgtaatcccagcgccttgggaggctaaggcgagaggactgctggagcccaggagttcgagaccagcctgggcaacatagccagaccctgtccctacaaaaaataaaaaaaaattagccgggtgtggtggagcacctgtagtcccagctactcgggaggctgaggtgggagggtcacttgagcccaggaatttgagacatagccagaccctgtcaccacaaaaaattaaaaaaattagctgggtgtggtggggcacctgtagtcccagctactcaggacttgaggcgggaggatcgcttgagcccaggagtttgaggctgcagtgagccatgattgcaccagcgtactccagcctgggccacagagctggacactgtattgagacagagtctcactctgtcgcccaggctggagtgcagtgtcacaatcttggctcactgcaacctccacctcccagtttcaagcaattctcgtgcctcagcctcccaagtagctaggattacaagcgtgagccactgtacctggccaaaatccataatactcttaaacttgtaggtctgatgtgtcacaggtaaagcagagtgacttttttttttttatttttttgagatagggtctggctctgtcacccaggctgtagtgcagtggcatgatcatacctcactgcagcctccaactcctgggctcaagagatccttccacctcaacctcctgagtagctgggactacaggcgtgcaccaccatgcctagctaatttttttattttttgtagagatgggggtcttgctgtgttggccaggctggtcttgaactcatgagttcaagtgatctgcccgcctcggcttcccaaagcacaggaattacaggcgtgagtcactgtgcccggccagagtaactctaccatagcaacgagagaccctgagcattagaattgcacattgatgtttggaaaatgttagacagcatgcaattcaatttttaaagcaaagaaaccctgtagctgtatataattttgatctaaaaacttgagtcattacattatcttttccattttgtctgaaaaaatgacagctttattgagatataattcatttcctatagaattcaaccatttaaagtataaaatgtagtggttttcagtatattcacagagatgtacaattgtcacttcaatgcatttcagaacttttttttcttttttctttttttttttttgagacggagttttgctcttgtggtcctggctggagtgcaggggcatgatctcagctcactgcaacctctgcccccagggtccaagtgattctcctgcctcagcctgtcgagtagctgggattgcaggtgcacgccaccaagcccaactaattttttgtatttttagtagagatggggtttcaccatgttggtcacgctggtctcgaactcctgactgcaggtgctccacctgccttggcctcccaaagtgctgggattacaggtgtaagccaccgtgcctggcccatttcagaacatttcatgaccccacaatgaaaccccagcagaagggaaaatgtaatggtgcagccattgtggaaacagtctggcagttgctcgaaagttaaatctagaattatctcatgactcagcaattccactcctaggttcctactcaaaggaaaagaaagcagaggctcaagaaggtattttacaccaatgttcacagcagcactgttcacagtggctaaaaggtaggagcaacccaaccgtccatcagtggataaatgggctgggcgcggtggctcacgcctgggatcccagcacttcgggtggccgaggcgggcggatcacttgaggtcaggaggtcgggaccagcctggccaacatggtgaaaccctgtctctactaaaaatacaaaaaataactgggcctggtggggcgtgcctgtaatcccagctactcaagaggctgagctgggaggattgcttgaacccaggaggtggaggttgcagtgagttgagatcgcgccactgcactccagcctgggagacagagcaagactctgtctcaaaaaaattggatgaatgaacataacgtggtccatccacacagtgaaatatgattcggccttaaaaagaaaacaagtcctggccgggcgcggtggctcacgcctgtaatcccagcactttgggaggccgaggcaggcagatcacgaggtcaggagatcgagaccatcctggctaacatggtgaaaccctgtctctactaaaaatacaaaaagaaattagctgggcgtggtggcgggcgcctgtagtcccagctactagggaggctgaggcaggagaatggcgtgaacctgggaggcggagcttgcagtgagcagagatcacaccactgcactccagcctgggtgtcagagcaagactctgtctcaaaaaacaaaaaagaaagaaagaaaaaaaacaagtcctgacataggctacaaggtggatgaaccgtgaggacatcaggctcagtgagagaagccaggcacagaaggacaaatcctgtgtggttccagtcctaggaggtccctagaggtgtcagattcacagagacagaaagtaggatgtgggggggggggtgccagggaccggggaggggaaggggagtgagtgtttcacggggacagagcttcagtttgggaagatgagaaagttctggagatggatggtggtgacggctccccaaccacgtgaatgtgcttaatgccactgaactatgcacttattaataaaacggtaaaactggtcaattttatgttatctagactttatcataataaaaagcaaagaaacctcatatccactaccaatcacttcccctctccacccatctatcttgctttttaatgttaatagaaatttctgaatattataggaaagtaacttttaaaaaaacatacaaatgaagttaacttttcaatgttttacttttttttttttgagacagaatcttgctctgtcacccacactggagtgcagtggtgcgatctcggctcactgcaacctccacctcctgggttcaagtgattctcctgtctcggcctccggagtatctgggattacaggcatctgccaccatacctggctaatttttgtatttttggtagagacggggtttccaccatgttggccaggctgatcttgaacccctgacctcaagtgatccacctgcctcagcctccaaaagtactgggattacatgtgtgagccactgcgcctggcccaatgttttacatttaaattgcatttataatgaagacatatttaatttttgcacatttgtggtttaatggcatcttgtggttgaatcctttagatgagtcagggttccagcagagaacgaggcctggtactctgaggcctccacgtgggaaggaattcctctccctccctggagtctggaatggagctccccgtggcccactcccgggggactcagtctctgcagctagtgtctgtgctctgcagtttccaggcagaaccctgattgggaaagggggctgcagggttgccccaggtggtcatggccaagtaccacagctgggtggcttcagcaacacagacttatttattctcacagttctggagcgtggatgtcctagatccaggtgtcagcagggccggtccctctgtggcttgcagacggcagtctttgccctgtgtcctcacgtggttgtccctctgtgcgtgtctgtgttctaatctcttcttacagggatccagtcggattggattagggcccattctgcattgggctaaattgattaagtttaattcatttcaacttaattctctcttcaaagaccctggctctccaactgcaccctagactgggcagcatagtcagaccctgtctctacaaaattttttttttattacagaagtataaaggggggccagtcatggtgcctcacacctgtaatcccagcactttgggaggccgaggcaggaagatggcttgaacccaggagtttgaggccagcctgggcaacatagtgctaccctatctctattaaagaagaaaatttcaaaaaaagaaaaaaaaaaaaggtaaaactgcaacatggtccctacaaggtcacacttttgtaatcccagcactttgggaggctgaggcaggaggactgcttgagcccaggagtttgaggccagcctgggcaacatgacaaaaccccatctttacaaaaaaaaaaaaaaaaattagccaggcgtggtggtgtgcacctgtagttccagctactcaggaggctgaggaaggagggtcactggagcccaggaggtcaaggctgcagtgagccatgatcacaccactgcactccagcctgggaaacagtgagatcctgtctcaaaaaaagaagaggaaagaaaaaaactaaaaataagtcaagaccctgtctccaaatccgggcatattcagaggtactgagggttaggacttcaacacaggaaggtgtgggaaaagggcgcggattcagcccctgatggctgcttcaggtcatgtccataatacactgaaatgatatggaaatctttttcttttttgttttctgaaacggagtcttgctctgtcgccaaggctggagtgcaatggcacaatcttggctcactgcaacctctgccccccaggttcaagtgattctccagcttcagtctcccaagtagctgggactaaaggcgtgtgccaccacgcctggctaatttttgtatttttaataaagacggggtttcaccatgttggccaggctgttcttgaacgcctgaccttaggtgatccacccgcctcagcctcccacagtgctgggattacaggcgtgagccactgcacctggcccatttttccaaatatttttgatcggcagttggttgaatccacagaggcagaacccatggatagggagggtgggctaattaaatccagccatctttgatgttttgccgactcgaaaagccacagcaccacacagtttttgtgtatgttgttagaaaggtatgtttgtcatggtgagcgggacagaacatactgtatttaactttagcgagcttggttggtaatgttaaaatatgtagacatatggtaggcaggcttccatctgtacttctgccctgggcctcccaaatgtaaagactgattagttacataagcagaacacgcatctttaaaaaaagactgtttacttgtttgaaactgtcccgattcattcacctttttcccattttccttactacataagcggaatgtgcttctaaaagaagaataattgtttacttgtttgaaaatatcacaattcattcacctgttttccttaattacataagcagaatatacttctacagaaaagactgtttactttgaaaacatcatgattcattcacctattatccgattggtggacatttatactatgtgttagttatctcctgctaagtaatagattaaccttgcaaaacaacgaggctttaaacactgtgtctgtggatcaggaatttgggacgggcttcgggcttctggcttggggtcttttatgaggttgccaatgagaggtcagcggcgggcagcaggatctgcttccaagatgccttcctgccagggttggcaagttggtgctgactgttggtggcagtccttgttcctcccaggcaggcctttcctcacacggcttgagtgtcctcacaacatggcggccagcttcctccagagcaagggatatgagggagagcaggggagagggcggcacacacagcaggtgaaagttgcccttgttatgatgcagcttcaggaatcatttcatagagccgggggcaggggggtggctcacacctgtaatcccaactactcgggaggcagaggcaggaggatcgcttaagcccaggggttctagactagcctggccaacatggtgaaagcccatctctactaaaaacacaaaaattagctaggtgtggtggcacgtgcctgtaatcccagctactcaggaggctgaagcagtagaatcacttgaacccgggaggcagaggttgcagtgagctgagattgcactactgcactccagcctgggcaacagagcgagactccttctcaaaagaaaaaaaaaagtattttttgaaaataagaatatttgtaaaaaagaatcatatagcataacttctgccacattccattaattagaagcgaatcaccgaatccgacctgcacacacggggagaggctcaggcctcaccttttgaaggaaggcatagggaacaatttgcagacgtatttctagactgcctcacgttgtttccaatctttcgccattaaagcaatgctccaaggcttattctagagtggcttcttgtcctgcctgagccctacaccacccacaaggcactaagagtcaacggcaaagaggccgggagagctgatttagaatcatcaggctccactcctggagccgggaccaccctctcctgagacatacaggagaggggcggagtccaaaccaagctggccagaagacaggacaggatggagactgggaggacacccacaggccctctctttggttttgtacaatctacagagctcaacaagagggtatgatcggcccaagatatagtgcaggggcagggaaatccaagtacggttgcagctctagagccctttggactgagacctgctgcctcttttgtataaaaagctttcatggctgggcacagtggctcacgcctgtaatcccagtactttgggaggccgaggcaggtggatcacctgatgtcaggagttcgagaccagcctggccaacatggtgaaaccccgtctctgctaaaaatgcaaaaattagccaggcatggtggcgggcgcccgtaatcccagctacttgggaggctgaggcaggaggatcgcttgaatgggggaggtggaggttgcagtgacccaagactgtgccattgcactccaggctgggcaataagagcgaaactccatctcggaaaaaagctttcatggccaggtgtggtgtctcacacctgtaatcccagcactctgggaggccaagatgggaggatctcttgagcccaagagtttaagaccagcctgggcaacatagcaagatcccatctctacaaaacagaaaaattagccaggcatggtggtgcacctgcagtcccagctcctcaggaggctgaggcaggaggatttcttgaacctagtaggttgagatcacaccactgcactccagcctgggcaacagagcaagaccccatctcttaaaaacacaaagtgttaggctgggcgcggtggctcacgcctgtaatcccagcactttgggaggctgaggtgggcggatcacgaggtcaggagatcgagaccatcctggctaacacggtgaaaccccgtctccactaaaaatacaaaaaaaaattagccaggtgtggtggcgggcacctgtagtcccagctactcaggaggctgaggcaggagaatggcatgaaccccggaggcggagcttgcagtgagccgagatcacaccactgcactccagcctggacaacaaagcgagactccgtctcaaaacaaaacaaaacaaaacaaaacaaaaaccaaacaaacaaaaacacaaagcgttcagtactagatagtaaatcgtgagtagctttctggggaggaagctccattcttctctggcttccctgggtcctgagaccttgcccctccaacctggaggcccaggcgtgctgagcagcaccagcagagggctgtgggggcaagtgaacctcaggtggaaggctgagcagagtccttcagcccaggaccccaaggaaggagcaggaacctgtggggctttctctatctgctcctgctgtgcctccgcacacagctttgtctccacctggtggacaccccacctaagaggacagtggaggcggctggttggtgaactggctccatggcagagatcagacagcccatgcagcagagggcagagctttccaactcaggcccttctgacatttgggacaacattgttctctggggtggggccgttctgggccctgcagcgtgctgagcagcgtccccagcctccacccactccatgccaggagctcccccaaatcgtgacaatgacaaatgttcccagaccttgaccagttaagaactgatggtctaggacaagctcaatgccagggcgtagccttgtgcaggtggacagagccaaaggctgcttcctgcctggttcagcccatactctggaaggatccccaggatgttgtaggctggcctctgacttggagtcaggcttgagtcagcaccatgaagacagtgaatgaaaaagaacacgctcttcttgtagacaaccctgaacagcaatgctcaggcacgctacagtttggaatccactgagccagggcgcagggaaaatggatgtgcgaccaacatgcagatggctggacgtccgctggctgagggcaggtctcagcatccctgctggcctgcagggcaactcccactggtttcagtgttacaccctgtgaacgtcacagctgtgagcagactgaggacctgtgagggatacagggtcagggtgacatcaggcaagatacccttgacctcgccgcaggtccccaccctgtcccgccactctgctgtctgatggcaggaatggagtgcctctcctacacagataacagagacgcgggggcagaggcagcgaaacccaggcaccctctgggagaaggaggggcatgccaactgctctgaagacccaggaggctcccccagaggctggaaaagccccggggaagggtgcctgggatttcaaagaggaggggctcgctgagaggagcgtgggagaaatgaggagtgctggtggggcgactgtcctgggtgctgagggacagaggttatcagggtgaggggtgacgggaggcagctcagggctctccagtgccaggtagaacctgggatttatcctcagccatgaggagccacctgggcatctcatgacaagctttggcctgaattacgtccccctgcccccaattcttatgttgaagccctaacccccatgtgactgtatttggagatgaggccttcagggagggaatgaaggttatatgacgtcatcaggtggggactgatctgagcagaactggggtccttataagaaaaggaagaggccgggcacagtggctcacacctctaatcccagcactttgggaggctgaggcaggaggatcacttgagcccaggagttagacatcagcctgggcaagatactgggatcccatctctacagaaaaacaacaacaacaacaacaacaacaacaaaacaaacacacacaaaaaaaccacactttgcgcctgtggatccttgggaggctgaggtgggaggctcgattaagctcaggagattgaggctgcagtgagctgtgatctcaccactgcactgcaacctggatgacagggcagtcttttcaaaaaaaaaaaaaaaaaaaaaaagagacaccagcagtgcacatggacagagaaaaagccacaggaggacactgtgaggaggtggccatctgaaagccaaggagagagccctcaccagaaaccaccccctgctggcacctagatctcacacttctggcctccagaacagggaaaaaatacattttgtttaagcctcagtctgtggtattgttagggaagccccagccgaccaagacaggtggagacggttagagaggggagcagttagagggaaggcccattaaggacacgagacacacaggggccagaactagagggggtgatggacagggggacagaacacatgcgccatcatgtcaccggcaggaaagcacagtcaaagccagctctcagcagtgtagggctttacaaacacctaaaacagggcctgggaacagccaagagtaatatgtgtttggtgactgtgaccacacagtgaccatgactcaggaagggaacacttggcctgcctcatctcaagtcattgcttgtgaccccagaagccaccaaaacatgcaaatgcatgcacacacacgtgcatgcacacactgctgttccattccactaagcatgcttacacgaggaagtagagcatgggctttgtctccaatggggcagcccacatcttcatgggtctcacacccactctcaggggagaccatggcctggcagagcccagaatttaggggaggaagggaggggacagaagggtttttaagatggagtcagctatgtatggccaaatgcggcctgcctgtttttgtacagtcccaagctaagaatggtttttataattttaagtgactggaaaaagttaaaagggtaataatacttcatggcatgtgcaaaattacatgaaattcacatttcagtgtccaaaaaaataaagttttattggcacacagccaagcccactggatgacacattgtccacggctcatcttgcaatacaatagcagggttcactaatgtgacagacatggtgtggctcacaaagccaaagatatttactatgtggctttttacagaaaaggtccgctgacctctgactcaaagcaacaatcatttatttcacttgtgattctgcaggcggggatcagctgggcagctctcctggccaggcggggctcagctgggtgcctcttctggccaaggcggtgctcagctgggtggctcttctggccaaggcggggctcagctgggtggctcttctggcccaggcggggctcagctgggtggctctcctggccaaggcggggctcagctgggtggcaatcctggcagaggtggggctcagctggatggctctcctggccagatggggctcagctgggtggctctcctggctgaggtggggttcagctgggtggcaatcctggtggaggtgggcctcagctgggtggctctcctgaccatggctgggcttctctgcccctggagggcagctacctgttggatggggcactgtgactcttctccttatatctcctcctccagcaggccagccttgggtccttcaccaggcagggtcccataagatggagcagatgcaggcaaggcctcttaagcttgggcacagggcagtcacagcgtcacttccactgcagccaactgtccaaggcagggcacaaggaagcccagatgcaagggccgggggagtggtctccacttctggactggaagagtagcaaggacatggtgggaagggcatggatataagggtggatgaaggatgaaggcattttggcaacaatctgccacattgtggtttcaggagctgagccagcaaaaacacagctcctgggaagaacaccccacagcatgactcatccagacaccaaaaccaaggcagcccagggcagtggttctcaaagagggcaggttttgcccccaggagacactgggtgatgtctgaggacatctgtggttgtcaccacttgggggagctcctggcatggagtgggtggaggccagggacgctgttcagcaccctgcagtgcccagaatgacttcactgcagagaataatccagcctcaaatgtcaaaagtgctgctgttggccaggtgcagtggctcacctgtaatcccagcacttcgggaggatcacttgagcccaggagttggagaccagcctgggcaatacagtgagaccccatctcttaaaaactgctgctgttgagaaactcagatctgggaaggacaggctggggtccctggggctggggactagggattagagcctagctctgcagatggtcggcagccaacattgctgcttctgccaggtctcagatgcgacagggagaggcccacagccctccccgggttcccagcgtgggcggtcacgctgactcccccttgccttctcacagtttagagtcagatgaaagctgtggcctcccgccctgccctgatcccctgaaaatgacaaagacaggtgtgcctgtagttaccttaggtttcccagaccccgggttgagaatccctgctgtcacaggtggatcaaaaagcatttgttgaggttaaatggaaaattttgtattatatatattttgccaccaaaaaaaaaaattacactctagcacatgctgcatggatgaaccttgaggacatcacaccccgtgagagaagccagacacaaaaggccatacaatatgtaattccatttctacagaatgtccaggagaggccaatccacagaggcaggaaggggatttgtgggtgccaggccctgaaggaggggttaaaagtaatggctaatggagatggagtttccttttgggccgataggaatgttctggaatttgaggtaacagtcacacaattctgttaatatactaaaaaccaggctgggtgtggtggctcacacctgttaatcccagcactttgggaggccaaggcaggaggatagcttgagcccaggagcacagttcaagaccagcctgggcaacacagtgagacccccgcctctacaaagtctctacaaactacaaaaattggccaggcacagtggtgtgtgcctgtagtcccagctacttgggaggcagaggtgggaggattgcttaagccctggagtttgaggctgcagtgagctttgatcacaccactgcactccagcctgggcaacagagcgagaccctgtctcaaaaaaaccactgtgccctgacacaggcagggcacagtggcctacgcctgtaatcccagcactttgggaggccgaggtgggcagatcacttgaggtcagggttcaagaccagcctggccaacatggtgaaaccccatctctataaaaatacaaaaaaaatgagccaggcatggtagcaggcttgtataatccccagctactccggaggctgaggtaggagaattgcttgaacctaggaggcggaagctgcagtgagttgagatcgcaccactgcactccaggctgggtgacagagcgagactgtctaaaaaaaaagtcttgttctttctaggcttttctagcaactaccacataacaggcgcttcacagccatctgcagagtctgattcagagacacctgtggtagctgagaccagcgatcatgtgaacacatcatctccggaccaaaaccaaaagtcgattattccaaacatggtcagagctcagattcctacatcccagagagaaaccactcagaggctgacatagatgacactagatggttagggcaggggtcttgatgtagagcatgtgcccgtaaactctgcaataaactcacaggacaggaagtagcccttttacattcttgcagagaaaaagagttgggcagaaaacaagagttcttctaaactacatcattaagaggttttttgttttaagagacagggtctcgctctgtcaccctggctagagtacagtgatgcaatcatagctcactgcagcctctaactcctgggctcaagtgatccacctcagcatcccaagtagctgagactacaggtgtgcaccaccacacccagataatttttaaattttttgtaaagtcagggccttgctttgttgcccaggctggtcttgaactgctggcctcaagcaatcttcctgcctcagcctcccaaagtgctgggattacagatgtgagccactgtgcccagctaattttttaaatttttggtagagatggggtctcactatgtcgcccaggctggtctcgaactcctgggctcaagcaatcctccacccttggcctcccaaagtgctgggattactggcataagccaacgtgcccagccaagtttttctttttttaatgtgaattttttacttctactttaaatcccaacttagcatggaaaatcatttgcattttcagaacaaaggaggccatcttctggctaagctgaaaaaaaaagtcattagaggccttctgaggcaccattttaaagatgatattgcttttgcgggttgcactatgagaaattctgtgtgtacaaaatacctgacagaaagtgaaagcagtcccgggcgatccggcggcagattcattgagtcattggataaatacttcctgggtgctagtggggaccagctgctgtcatgggcgctgtcacagcagcggggaataaccagaccaaagtcccgtcctccaggagggtgctgcgcgatagtccagggagacacggggtcagcaaaataattcaacgcgatctgatggttctcatgccgccgggaaggacgcggcaagggggtgtgagcagggggttgcactttctcacgggctggtcatggcgggcctggtgggtgaggaggagggtgaagacacaaagttggggaaacagggcagcgcatttgagcagagggaattgcatgggaagggcctgagggtgaagtgcccggaacctggattggtccagaaggcagcgtgactagagcggaaggaatgaggggagatggggtcagagaataaagggtgtggaacagggggcagaggacaccatgatggatgtcacaggccatcgtaggggctccagcttgtcccctgagaccccacgggggtttccagcggaggagggacatgggctacgttgtgatggggcctctttggcgctgtgcgcggatggaaatgggggcgagagcagaaggaagcgtgaaggtccaaaatacagacgaggcaggctggtgcgcggtggaggcggtgcgcgtgcaggggcgtgcgctcaaggtcagaagaaggaaaggaggccagcctggcttcccattttgggatctgcacgaaggactgccggcggccctgcctgccgcggggaagccagcaggatgaaggggttttggagaagcgtgcaggcgcttggacttggatatgatcagcctgagatgccagtcagacatccacagagcatgctgcatgggccgctgtatgcaggggccgagactagagctccagggagaggcctgcgctggagtcagaaactgggtgtcatcgatagttaatatttttttaagattgagatatagtccacactgtaacatcccccctttaaagtgcacggttcggtggcatctagtacatttacaaggctgtgcaaacatcacctctacctaatttcagaatgtttccaccaccccaaaaagaaacctgtccccatcaacattctctccatccctccccagcccccggaaccactaatccatttcctgtctctatggattcacctgtaaaatgggaacacctaatttggtatggtgatggtgtgatgattaaacaagaactcacaggctacagggcccagcatgtggcaggagcttacgatgtagcccagggtagccagagtttcctttatttttggagacggagtcttgctctgtcgcccaggctggagtgcaatggcgccatctcggctcactgcaacctccacctccctggttcaagcgattctcctgcctcagcctccccagtagctgggaatataggcacctgccaccacgcctggctaattttgtatttttagtggagatggggtttcaccatgttggccaggctggctcgaactcctcacctcaagtgatccgtccacctcggccttccaaagtgctggattacaggcaggagtcactgcacctggccccagagtttccaattttaagcgatgctaggaaccagaggttttgtgaaatcttcttttttttttttttttttttttttgagacggagtctcactctatcgcccaggctggagtgcagtggcacagtctcgactcactgcaacctctgcctcctgggctcaagcgattctcctgcctcagcctcccgagtacctgggactacaggcgcaccccaccacgcccagcggaatctcccacttttaaatgctggcaactaattcaaataaagcaagcaaaaagctcactgcacaggcgtgagaaccaaacacggcctgcaggctgtcaattttcaaagtctgacccacactgaggaggtgagagcgatagttgagaaacaggtataaaaagtcacaaactggccgggtgtggtggctcacacctgtgatcccagcactttgggaggctgaggtgggcggatcacttgaggccagcagttcgagaccagcctggccaacatggtgtatacaaaaaaaaaaaaaaaagccgggcatggtggtgcatgcctgtagtcccagctactcaggaggcactgaggtatgagaatcacttgaacccaggaggcggaggttgctgtgagccgagattgcgccactgcactgcagcctgggcaatgaagcgagaccctgtctcaaaaaaaaaaaaaaaaaaaagtcatgaatttattctcagtaaagcctgcccataaccaatgagcccaggctatttgctgctgctgctgctgtttggagtcacctgttgctggaaggaactgtgccactgtactacaccagagacagctgccatctccatgacaacaagcacgcgctggtgctgcctgcctgggaggggagaagagcacaggtgggaaacggggagcccaggctaacatggacttacaaacagtggtgacacacgtctacaagtcctgcccggcactcccaccttcaggccccaggctaatgtcttttgatggctttttggtcggagaatttgttttgggaagtcaagctttttcaggtgcatccttctaaactgaattttgggatgcaaagctagcgagccccactgatctcattttgttcacacggccaccaaactcaaggggacgtcaaggcctaggggatggaatgggcccatctgagctgcccacgtcacctggcccagagctctttctgtagggccatgctcttgcttgctccgaagagacggagcaggcttaggtgtggtccacacttcagagggacacgggtgggatctgcagatagaggcaggtggcgaaatgtcttagggacagccaggaagatgggtcattctctatttgcatataatgctaatttctgctgaacactgcattgaataactcaatgggaacacacacacacaaaaccccccaaaacatttagagtccaaggaaaaactcaagtggaaataaagattttcctggaatcacaggctgagaaatgtcatcattctttctaaaaacaaggactcagtcaggtgcagtggctcacgcctataatcccagtgctttgggaggccaaggcaggcggatcacctgaggtcaggagttcaagaccagcctggacaacatggtgaaacccagtctctactaaaaatacaaaaatcaaccgggcatggtggtgcatgcctgaaatcccagctacttgggaggctgaggcaggagaatcacttgaacctgggaggcagaggttgcagtgagctgagattgcaccactgtactccagcctgggcgacagagtgagactccgtctcaaaaagaaaaaactaaaataattaaaaacaaggactctttcttcccgaacacagctcatcacctatttctctatcacccccatggcagatggagatgaaggctgaggccacccagctggaaatggaaatgtcacagggccctgtgatggttaatactgagtgtcaacttgactggattgaaggatgcaaaatattgtcctgggtgtgtctgtgagggtgttgccaaaggagagtgacatttgagccggtggacagggagaggcagacccaccctcactctgggtgggcaccatctaatcagctgccagctcggccaggataaaagcaggcagaggaacgtggaaggactggactggctgagtctacaggccttcatctttctcccatgctgggtgcctcctgccctcgaacatcagactccaagttcttcagcttttggactcttgggcttacaccagcagttggccaggggctctcgggcctttggccacagactgacggctgtgctgtcggcttcccgacttttgaggtttggggactcggactgatccacccctggcttccttgtgcctcagcttgcagacggcctatcgtgggactttaccttgtgaccgtgtgagtcacttctcctggataaggtccctttcatggagacctctatcctgtgagtcctgtccctctagagaccctggctcatccagccactgacttccgtgccccgggaaccgctggagaacacctgcactcccgcgttctgaccttggcgcggtgggtctgcgactgcgtgcagcgtgagccacacccaggtggagggcgcagggcctcaggggccagagagacaacgtgccctgccacaccagaggctaatgcgtccagtcaagtccttcatcagggagagagttttcaagtctgttttaccagcagtaagacgacatttcaatcgctgtgtgtacacacaacacacacacacccagaatttcattttgtggcacttctgttcacaggggttttatattcaaaatgcatcttacacattcatacccgtaacagtcctgattttgtaaccagtttttttctttttctttttttctgaccatgaaacccttaggtgcagtctccatgtgaaatgcccatttcagatccagaaacccccaaaatgtcccaacgtattggaaaggagttctgttaactcaatcctcgggaagataccaaaaggacttttttgctttttgagtcagggtcttgctctgtcgcccaggctggagtgcagtagcacaatcatagttcactgtggcctcaaactcctgggttcaagtgaccctcccgcctcatcctcccaagtagctggaactacaggtgtgcaccaccatgcctggctaatttttttttttttttttttcagagatggggggggtctcactatgttgctcaggctggtctcgaactcctgggctcaagtgatcctcctgcctcggcctcccaaagtgctgggataacaggcgtgagccactgcacccggcccgaaaggattttatcaccccaggctcactttcaaaccgtcttcttttgaatggagtcaagaggccagctccaaaccaggacccgcctggttcctcaggatggagccaccatagggcggcaggttcttgaggtgggaattggattccagagcctgggcgtcgagtttcccgagcctcgggggcgagccaggttatgcggcagtgggactgatgggcttgtcctctgccctgctgagaaggaacatggtcccacgtggagctggctgcatggtgagccccaccaggcaggtgcttgagaacaccaacttgacgataccatgctgatcacgctagagaaggcattagctacgtgccctcccagacgcaggacaagcgacagaatttccaacagcatcggctcactacggcaacacctttttactcttgtgcaccaaactggccgacatctcaggaacaaggaggggtcatctcctgttccagccctctcctgctgctttaagaaacggaacgacctgcagagccctgtctgtgctggctcatgagccgctcgtgtcaagggcaggacaagatggcaaaccccaggttctcatgagcaaccacaaccggcctcgaaccaccaacctggactcaaccaacgacactcaaaacaacagacaccaccggctctttatacatccatggcaagggcctggggacattacaggtcactctgctcccaaggggcagagctcaccacagacttcacctcctgcggcaggactggccttcccagatccacaatgccgcggaagcagagccatgccgcctctccactctccgccaaccgcgacaagtaaacgactcacaataggtccatttaaaaaggcaaatggaacttaccttaggggaaaaaaacctgcccaaagcaaaaggaacatatccaccaaaaaaagaagtgtcattcccccaaatatgtacaaattaactttctagctaaaagaaatctggcaactttaaaattaaagttgagcagagcgcggtggctcacatctgtaatcccagcactttgggaggccgaggcaggtggatcacttaagctcaggagtttgagaccagcctggccgatggcaaaaccccgtctctacaaaaaaatacaacatttagcctggtgtggtggtgtttacctgaaatcccaactacttaggaggccgaggagggaggactgcttgaggccaggaggttgaggctgcattaagttatgaccacaccactgtgctccagcctgggtgacagagtgagaccctatctcaaaaaataattgaaatagggctgggcacggtggctcacgcctgtaatcccagcactttgggaggccaaggcaggtggatcacctgagatcaggggtttgagaccagcccggccaacatggtgaaacctcgtctctattaaaaatacaaaaattggctgggcgtggtggtgcatgcctgtagtcccagctgctagggaggctgaggcaggaggattgcttaaactcgtgagccagacgttgcagtgagccgagatcgcgccattgcactccagcctgggcaacagagtgagaccctgtctcaaaaataataataataaaatacaaagacaatgaacacagggtttacaagtccctttctacgtgttttccttatttttctagggctgcctagttatttatctgatcagggcctttgtcccatgacccccagaaccccaggaaagaacaccaatattcattaccctcaggtgaaaagactgttttccagggccatttgaaaatgcttttaaatctgatgtatttgttctgatcattctaaatacacacgttggtagacccacacaagagacaaatacaaaataaaactattaaaaatccagaaacagagaatatgtttaggagagaaaaaagtctcctaggaatttacttctgccccagtatgtatgaactaacttttggttcttttcttttgagatggagtctcactcggttgcccaggctggagtgcaatggcgcaatctcagctcactgcaacctccacctcccggattcaagcgattctcctgcctcagcctcccgagtagctgggaccacaggcacgtgccaccacacccaggtaatttttggattttcaattgagatggggtttcaccatgttggccaggctggtctggaactcttgacctcaggtgatctgactgcctcagcctccccaaatgctgggattacaagtgtgagccaccgtgcctggcctaacttttggttctaaaacaagtaagatgaaaaatcaaaatccacacttcaaaaacatccaatctacctaattccttgtataggagctcagaccgcaagtcctgtcatttgaaaaggtttcctgaaagtacacttcaacccattttcacgtgcagccggcagctgcctctcggattctcttctaaggagttcagcccctaacacgtatttcagccttgctgagaagggcgtgaaaaagaccgcagcaacatgggaggggcaagttcccccctcgctcctccagggtcgtgctccctggaaagaatgggtgcagcagaggcacagttacttattaggatgtgcaaacagctggaggggcccacggtctcactttcctggggctttttggacctggtggtaggagtccatttacaggtatgcgccctggcccccaaggtggcgacatcggactctccagggcagcctgtgttccttggacctaagctcaaaggacggggttggccttggtgggtggggtttccactggaaggacctggaggcctgccggagggcgagcgtggcgtctgggctgggtatgaccaggtcggttctgaagccggttgcagccacacctggcaggcaggggctcccatcaggggtattaacaggttctgtcactggcactggggctgccgagcctgttctcatggtcagcatgggctccgggcctttttcaagctacctgttgcccgggagacatttttgagagatacgggttgggtcaccgttactttcccagtgacacggggccatgtgctgtctcaatgtccccactccggggaggggctcttgtttttttattgttttttgagacagggtctctcgctgtcgcccaggctgcagtgcagtggtgcgatcatagctcaatgtagcttcaacttcctggcctcaagcaatcctccctcctcggcctcccaaagtgctgggactgcaggtgtgcactgccatgcctggccatgtgttttttaatgtctaaaggatgtagccctaaaccactatctgaccgggccctgaactagcagggcaggggcaggtgacagcgtaaaggatggcaataacacagtctctaccacaggcgcaacctctaagctgacgtggtcagggctgggttccacaccacggctgcctctctaggctccagcagccctgactgtgagtgaggcactggcctgggcccattcctagccgggccgaccactgggcccccacgtcagtccagtgactgcccccaagcctcactttcctcatcagcaaaatgggcttcacaacacctaccccaaggatcacgtgagggctcagtcagtatcaggtgcccgggactcacctcacacagagaatcaataaccagcaacgagcatcctgcccatcactaacagagtgtgatggcgttccaaccccgcctcccacttcctgaaactctccaggggaaggagctcagcttataatgtatgctaatagtgtcagaatctaattgcagggaggaagtgcctgtaatcccagcactttaggagggaaaggcaggagatctcttgaggccggttcaagaccagcctgggcaaaatagcaagaccctatctctacaaaaataaatatcgccaggcatggtggtgcgcacctgtcgtcccagccactccaggaagctgaggggggaagactgcctgagcccagaagttagaggctgcagtgagccaagactgctacggcactccagcctgggcaacagagtgagatcctgtctcacaaacaaacaaacaaacaaacaaacaaacaaacagaggttctctggacaggacatcaagtattacaccaaaatccagtagtcttctaactcagatttaacaagaatgcaaaggcacagctagccgactgcgtaatactggtggaactgtgacaaactgctaaacaaagagaaaggtaacggcagaggcctctggcctgtcgcttcccactactctgcacttccaacacaccactttgagctctacatactttcatgactagtgtgacttaacatgtacagaccctgttggagctcctcagctattctcagctaaaaaactgtgctcaatgctaatctttcttttcttttctctcttctcttctcttttctttttttctctctttttcttgagacagactcccgctctgtcacccaggctgaagtgcagtggtgccatctcagctcactgtgacctccacctcccgggttcaagcaattctcctgcctcagcctcccaagtagctaggattacaggcatgcgtcaccacagctggctatttttttgtatgtttagtagagattgggtttcaccatgttggccaggctggtctcgaactcctgacctcaggtgatctacccgcctcggcctcccaaagtgctgggattacaggtgtgagccaccgtgcccggcctgcgctcagtgctaattaaaagcactgctgcattcagttttccacatgggattaatgtttcattctgaagacctgcagcactaattcaacttctaaaaaaaaatatgagattcataagaccatataaaataaaataaagataatcaacattatcaacagctaactgtaaacttttcttatgccttcaagagtgaatgtgggtccaattcttactgaccaacaattaagcagttcagataccaaccctatttatggatgaaaatgttaaggaaattcctacccagggctacggttatcatttttttgttcatttgttttagagacagtgtcttgctctgttgcccaggctggagtccagtgttgcaatcccaactcactacagcctcaaactcctgggctcaggtgatcctcctacctcagcctcccaagcagctggggactataggtgcacaccaccacatctagctaattgttaatttttttatagagatggggggaaaggtctcatcattttgcccaggctaatgtcaaactcctgggctcaagtgatcctcctgtcttggccttcgaaagtgctggagcgacaggcatgagccaccatgcctggcctggttatcaattttataagctaagaaaacctacccaaaactcctaaaaaatgaattgctgcctttgttttggcaattcttgaaacaggtgttgtaaatactgctgtccaaatgctgccataaaattggtacacaaaatctggtatctcatcagttttctcatggcaggttatataaaccataggtacttttttgtttgtttgagacagtctcaccctgtcgcccaggctggagtgcagtaacgtgatgatctcagctcacagcaacctccacctcccgcgttcaagagattctcctgcctcagcctcccgagtaactgggattacaggcgcgcgacaccacgcccggctaatttttgtatttttaggagagacagggtttcaccatgttggccaggctggtctcgaactcctgacctcaagcgatccgcttgcctcggcctcccaaagtgctgggtttacaggctgagtcaccgcgcctggccaaaacatacgtactttaaaagcagccaaagtttccaaacaaaagtcatttcccacaagaaagaatgtctagttaacctaaagtcattcaaataatgcctatcatcttgtttcaaggttttgtgagaatgaaatgtattttgctatgattcctgtgttatttttagttaatagcttactattttcttaaggaagaacacattctctctgcggcaattctaaggacggactaactcaacaactcaacaccgggttgcgtgtatactgtatcacctaagccatcagaacacagaaggtagctgtgctaaaatgggttgcgtgtatactgtatcacctaagccatcagaacacagaaggtagctgtgctaaaatgtataagcacgttaattcaaatcaatgacagaagcctctactgaagcttagcaatcacctatttgaacaacataaacattcaatttctcctctggaaggtaattttaatagcaagcataatattcaagtgattttccacgtctgatggaagaatacaatggagaaagaaagaagagaaagagaaaagaaggaagagctagcaggcagaggggtggagtgtgtccagaagtttgtactagcctggatcgctagccaagtccagccgctttaactgagccctggcaatcaaaacaccactgaggatgaaggaagcaaaagaaaagatcaaataaaaattaaatgctccattctgggaaatcagcaggtcatagattctttccctaataggaaatccattactagtcaaatactccaccagagaaaccactccgagtgcaggaaacagatgcactcctcattcccacagccctggtttccaagccctgggtggtttctctttgtgattccattagaaagggcacagcaatatcacagcactggtggaagggtcggcactgccgctccaccgcgggaagctgaaacaccagcctggatctctcttccatgtgctgaaatgcagtaggaacaccgcggggggcaaagacccccctgagctcagcagaggcccctctatgaggtgcccaaggggtggtttgtatctgtgggggctcagcagggactgtgagaaacaaggttatagcaagctaccagctggaaactaacacaagggtgacacgcggaaatgatcaactgttggggggggaatctggtcccctcagagatgccagccctggctcccggactgggactccagtcttgggggcagatggacgggctgaagatagcagagatgctccgaggagcaggcctgggagaacagtgtagagtgtgtgtttgtacacttggggcacaaacttaccccgtgtgtgtccctaccctctgagcccttctgcccctggccagttcccagtgtgtccccatcccctgccatctctcctccaggatcctttctctccctcccctcccaaacgaccacatatttaagacctagaaaaggatcttaaatatcacaacactcagggccctttctccctcctcactgtcccagcagggtcccagttccctggaaacccaggtgcccaccctcttatttgacctcaggacctcctcccacataatactggcttcccgccaagtctctgtcccccttccccagtcaggcctcagttccccaccaacctcggtttccgcccctccctggggtaacctcccaggtctctgtcttctctcctccaccccacatcaggggtcaggttcccacccctactccacaccccaccccaggtctctgcccctgcctgctaggtaccctcccaggtctctgccttctctcctacccccaccatcaggggtcagtgccctccacactcgaatgttgctgccccctgcccagtcgggaaacttcccaggtctctgccttctcctcctccagcaatcggggattaacgcccctctgcccttcccctcctcctgcccagccagacaccctcccaggtctgaattctctccccctaccagcaatcggggtcagctccgctctagctctccccctgtccagccagacaccctcccaggtttctgtcttctctcttacccccatcaggggccaattcctcacccctcgactgtggcttcctcctgcccagccaggaaccctcgctgatctctgttttctcctcccctacaagtaatcgggggtcagctaccctctgtccatccccctgcccggccaggcaccctcccaggtctgtgtcttctcctccccccgcaatcgggggtcaatgcccctctgcccttcccctcctcctgcccagccagacaccctcctaggtctgtgtcttctcttcccctaccagcaatcaggggtcagctcccctctgcccatccccacccactccccggccaggcacctcccaggtctcctccctgcattgggtcagttccgtcccctcccctcctcggtcagaccacccaccccccgcccgggtctgtcccctctcgctgccctcctcgtggcgcccccatcaggggctgacccccccgaccccgcacaggcccaggcccaaacccaggccccctcccacttcaggagccccctcccgctcccgccgacagacaccgttggctgcagagacgtctcagccggagccccggagcccgcatcccgcccggtgcctaacctgaggccgccccgcctgcttctcccggcgccgcggcttccctcaggccggggttccaggttggggctgggactggggccgggccgggcgcacgcggcgggagaaggggtaggcggggtcccggccaggctgcaggggccgggactggcgggggctggcgcggcggggcagttacctgtactgcgggccgccgccctgcgcgaagtcgaaatactgactcgtcgccatcttggcgtcttccccgagcctggcggacccgcgacgtcacccgccccgcccccgagccgcgtgccgctcgcgcctggccacgcgccccaagctccgccccctgcgcgaagccctcaccttctcgcttccttctcttaggctagggagacaccgccccgcgaccacacctgccccgaggccccgcctcctacgcagagccccgccctcctcttaaccactcaaatgtggaggtctctgctcaagccccgcccatgctagaagccctgcctctttctcggagccccacattccctttaaccactcagatgtggtggtatctgatcaagtcccgcccatgctacaagccccgcctcttactcagagccctgccttccctttacccactcagatgtgatctctgctcaacccccacccatgccacaagccccgcctttttttggaaccgtaccttccctttaaccattcaggtgtggaggtctctgctcaagccccacccatgccacaagccccgcctctttctcggagccccgccttccctttacctgctcagatatggtctctgcacaagccctacctctgtctccgagccccaccttctctttaaccactcagatgtggaggtctctgctcaagccccaccaccaccacagccagctaatttttaaattttttgtagagacagtgtcttgctatgttgcccaggctgatgttgaactcctggcctcaaataatcttgccttggcctccaaaagtgctgggattacagacgtgagccactgcatctagcctcagaatgactcttcagaaggcccccatggtctctgcctcctgtgttcacaacgtgatataaataaatgataggccgggcacagtggctcacgtctgtaatcccaacattttgagaggcggaggcaggaggatcttgagccctaggactttgagactagcctgggcaacatagcaagaccctgtttctacaatttttttttaattagctggtcatggtggtacatgcctgtggtcccagctactcaggaggctaaggtgggaggatcacttgagcctgggctgtcaaggctgcagtgatctgtgactgtaccactgcactccagagtgagaccctgtctcaaaaaagagaaaagaaagaaagggctgggcgtggtggctcacgcctgtaatcccagcactttgggaaggcgaggtgggcagctcacccaaggtcaggagttcaagagcagcctagccaacatggcaaaaccctgtctctactaaaaatacaaaaaaaaaaattagccaggcgtggtggggcacacctgtaatcccagctactcgggaggctgaggcaggagaattacctaacccaggaggtggaggatgcagcgagccgagatcacaccactgtactccagcctgggcaacagagcaatacaccgtctcaaaaaaataaaaaaataaaaaataaaaaaataaataaataaataataaaagaggagagggagaggagcagggagggagggaagggaaggaaagaagagagagagagagagagagagaaagaattgaatgaataaacaaataaatggaggcaaacagacaaatctcttatgcagaagaattcctaatttgtgtagctacactgcgcttaaggagatagagagtaactctacacctcttgagtgtgggttgtgcatagtgacttccttcccaagactgcagcctggaaggagggggagggagagtcacttgacagtattgaaacctgacaagcagcagcgtgtttggcggtcccgcggatccgtctcttgcttccacagtgtttggatggaacagatccgggaactcacttccagcctccgaccacccgctgatttcctctcttcttgcaacctccaggagcatcggctcagccatctcctgcttctcggaccaaccaacgccgtttttttggttagctccttcttgccgaccaaccatgagctcccagattcgtcagaattattccaccgcggtggaggcagccgtcaaccgcctggtcagtttgcacctgcgggcctcctacacctcctccctctgcgggtttttttttttttttttttgcttgttttttttttgagacggagtctggctctgtcgcccaggctggagtgcagtggtgcgatctctgctcactgcaagctccgcctcctaggttcacgccattctcccgcctcagcctcccgagtagctgggactacaggcgcccaccaccacgcctggctaatttttttgtatttttagtagagacggggtttcaccgtgttagccaggatggtctcgatctcccgacctcatgatccgcctgcctcggcctcccaaagtgctgggattacaggcgtgagccatcgtctgcgcttctatttcgatcaccaagatgtggctccggaatgcggggcttacttcttccatgaattggccaaggagaagcgcaagggtgttgagcgtctcctgaagatgcaaaaccagcgtggtggccctgctgtcttccaggacatcctgaagccaggtcaagatgagtggggtaaaaccctggaagccatggaagccgccatggccccggggaaaaatctcaaccagagtcttttggatcttcatgcactgggttccgcccctacagacccccatctctgtgacttcctggagagtcacttccgagatgaggaagtgggctgcacgcggtggctcacacctgtaatccctgcactttgggagaccgaggcaggcagatcacctgaggtcaggagtttgagaccagcctggccaacatggcgaaactccagttcttctaaaaatacaaaaattagccgggcgtggtgagctactcaagaggctgaggcatgagaatcgcttgaacccaagaggcaggggatgcagtgagccgagatcacgctactgcactccagcctggggaatagagtgaggctctccaaaaaaaaaagaagaagaagatgggtgaccacctgaccaacctccacaggctggccggcccggaagctggggggcccagaggctgggctgcatgagtatctcttagaaaagccgactctcaaacacggctaggaacctactgagcccagcgacttctgaagggccccacgtaaagtaacggggcttctgcctaagcctttccctccattcactaggcagcttttttgtttatttgtttgttggtttgttttgttttgttttgagaaggaatctcgctctgtcgctggagtgcaatagcacaatttcagctcactgcaacctccgcctcccaggctttggcgatcctccaacctcagcctcccgagtagctgggattactggcatgcgccaccacacccggctaatttttgtatttttagtagagacggggtttcaccatgttggccaggctggtatcaaactcctgagctcaggtgatccacccgcctcggtctcccaaagtgctgggattataggcgtgagccactgcgcctggctttgttatagcaccctgaacagactaagacgcccactttgaacactagattccaaaaagcatcatagaagtcttgggcttctgttagataggcatggtggcaggtgcctgtggtcccagctactcaggaggctgaggcgggaggatcacttgagcccaggaggcagaggttacagtgagccaagatctcaccactgcactccagcctgggtgacagagccagacccccgtctcaaaacaaacaaacaaacaaaaaacataaaaggggcctggcgcagtggctcatgcctgtaatcccagcactttgggaggctgaggcgggcggatcacctgaggtcacgagttcaagacgagcctggtcaacatggtgaaaccctgtctctactaaaaaatacaaaaattagccaggcaaggtggcgggtgactgtagtcccagctactcgggaggccaaggcaggagaattgcttgaacctgggaggcagatgttgcagtgagccgagatcgcgccactgcactccagcccaggtgacggagtgagactcagtctcaaaacaaaacaaaacaaacaaaaaaggaagtcttgggtcttgggcatctatgaacttttgctttgctgaagtctttcaaatcagttggctttttgacaatggagtattacgagagcattaaagtaagaagtgcattcagcagatacagggctactaattcttggacaggctccatggagagcccagggtgctgagggaagccacatttggtgatttagcggatggcactcttccatctgtaactccatgaccatgtgtggccaccaggaatggtctggtgggtctggccagtgcagctctccctgccatgccctggctaaagtccaacaaggtaattaattgcacacggcctctctccaagtccctgccgttctaattaggtaatgaaggctgtgtctctttacaaaggatctgttgtagtgttttctctgggttgcattttttctattatttactgcaaggattgtgctaaatgctttacatgcaaaatgtgatctagttcccacaacagccttcagaaggccgggcatggtggcttacacctgtaatcccagcactttgggaggccgaggttgggagttcaagaccagcctggctaacatagtgaaaccctgtctctattaaaaatacaaaaaaattagctgggcgtggtggtagttgcctataatcccagctactcaggaggctgaggcaggagaactgcttgaacctggagggcagaggttgcagtgagttgagatcacaccactgcactccagcctgggtgaaagagtgaaactctgtctcaaaacaaaaaaaaaaccaaaaaaaaaaaaaacagccttcagaagtagaaacaggcatagtggctcataccagtaaccccagctacttcggaggccaaggcaggaggattgcttgagcccaggagtttgagaccagtctgggcaacatagggagaccccatctctacaaaatacaaaaattagctggatgtggttgtgtgtgcctgtagtcctagccacttaggaggctgaggtgggaggatcgcttgagcccaggaggtggaggctgcagtgagccataagtgtaccactgcattccagtctgggtgacacagcaagacccagtctaaaaaaaaagaaagaaagaaaagaaaagaaaaaagaggccaggcgtggtggctcacacctataatcccagcactttgggaggccaaggcaggcagatcatgaggtcaggagatggagaccatcctggctaacacagtgaaaccccgtctctactaaaaatacaaaaaaattagcaaggcatggtggcacctgtagtcccagctactcgggaggctgaggcagaagaatggcatgaacccgggaggcggagcttgcagtgagccgagattgcaccactgcactccagcctgggcgacacagcaagactccgtcccccaaaaaaaaaaaaaaaagaagtagacacagtcgattctcattaattctgttctctaaagtcaataccaagctcactaatactgaccatcgctcctaagagaaacacgaggttgagttcctgtgagcctctagtcacagtgtttgcatcaaccatcaatacacgacctcggccagtgcagtggctcacgcctgtaatcccagcactttgagaggatgaggagggcggatcaactgaggtcaggagttcgagacccgcctgaccaacatctctactaaaaatacaaaattcgccaggagtggtggtgcatgcctgtaatctcagctactcaggaggctgaggcaggagaatcactttaacccaggacgtggaggttgcagtgagctgagattgcgtcattgcactccaacctgggcaataagagcgaaactccgtctcaaaaaaaaaaaaaaagaaaaaaaagaaagttcaaatgtctagccaaccgggattagttcagattgtgtgacccgaccccggccaatggggaaagggcacaggggcaggacttgcctcaggaataaaggctctcatgcccctttgttcaggtgcgctctcatgacgactggacaaagaaaaacacctctctgcgcagaagtaaaattgctttgctaaaatccctttgtttgtgtattcaatcttcttaggattttgagcgttattcccaacaaatagacatggttgattcattcacattgaactcatagcacttttactcatatctgaagttctctaacacactgcttttcttcttggagctttctttttttttttttttgagatggagtcttgctctgttgcccaggccagactgaagtggcgcgatcttggctcactgcaagctccgcctcccgggttcacgccattctcctgcctcagcctcccgagtagctgggaccacaggcgcccgccaccacgcccggctaattttttgtatttttagtagagacggggtattgccgtgttagccaggctggtctcgatgtcctgaccttgtgatccgcccacctcagcctcccaaagtgctgggattacaggcgtgagccaccgcgcccggcctctccttggagctttcttgcacttaggaagactagacagtgcttcagcatgaagcttggaagtcattttattttatggatttatttatttatttttgagacagagtcttgctctttcacccaggctggagtgcagtggcgcagtctcagctcactgcaacctccgcctccctggttcaagcaattctcctgcctcagcctcctgaatagctgggattgcaggcgcgtgccaccacgcccggctaatttttgtatttttagtacagacggggtttcaccatgttggccaggctggtcttgaacttctgacctcctgaccacccactttggcctcccaaagtgctgggattatacgcgtgagccacattgcctggcctgtatcaagcattcttttagggcagaatttttcttgctcagtaccgtggacattgggaccagattattctctggggcggagccatcctgggcactgcagggtgctgagcagcgtccctggcccccatccactccataacaggagtatcccccagtcgcaacaaacacaagtgtccccagaaatcgtccggtgtccgctgcgggcaggatcaccacccccccaggtgacagccactggtgtaggggttaaagatacagggtgacaggccgggattacacctgtaatcccagcactgagcccagcactcctggcctcaagtgatccacccgcctcagactcccaaagtgctgggattacaggtgtgagccactgcacccagcccacaagaaaattttctacaagctcaccttcagaaaagtttcaagatcctacaaaatctagcccttttgtgcatttccaaacgaattcctcagggatggccggcagaataatggcccctaaagatatccacacccactgggtgtggtatgtttgcctgggaaaaatagtgagaccccatctctacaaaaaattgtcaaattaaccaagtgtgatggcatacacctgtagtcccagctgccagggaggctgagataggaggatcacttgagcccaggaggttgaggctgcagtgagccatgatcacacccccgcactccagcctgggctacagagcaagaacctgtctcaaaaaaattaaattaaattaaaatttttccattttaaaattaaaataaaacgaaatgaaaacagacagaggccagctgcagtggctcacacctgtgatcacagcactttgggaggccaaggtaagcggatcacctgaggtcaggagtttgagaccagcctggccaacatggtgaaaccccgtctctactaaaaatacaaaaattagcctggcgtggtggtgggtgcctgtaatcccagctactcgggaggctgaggcagaaaaatcgcctgaacctgggaggtagaggttgcagtgagccgagatcgcaccagcctgggtgacagagcaagcctctgtctcaaagggaaaaaaaaacagggaaccaagcttaggtcacacgctgtggctcctcggtggtggctgtagcaccatggacagctcccaggctttggtggactggggagaagctgttgctctttaaatgccagtctgggcaggcctgtctgtccagaatatgccttcctccctcttttttattcatctaactccactcactcctcaggggtctcactcatgcagtcgccacctctgtgccccaccaggaaacctccccaacggtcccccaacctgcaccactccaaagatgtctctagatcagcccagactctgttgtccacctgtttctctcaactgaatgggaattatttattttttttttttttgagatggagtctcactctgtcaccccacctggaatgcagtggctcaatctgggctcactgcaacctccacctcccgggttcaagcgattctcctgcctcagtctcccgagtagctggaattacaggcgcccaccgccacgtctgaccaatttttgtatttttagtagaggcggggtttcaccatgttgtccaggctggtctcaaacccccaacctcaagttatctgcccgcctcagcctcccaaagtgctgagattacaggtgtgagcggcctcccaaagtgctgggattacatgcctggcctcaactgaatggtcattctaagagaattcccaatcctgcacacaaaaacagcataaattaactgaattagggaagccacgcctctgccagccgtgagctgggaagaagcagatacctcagaggcagggagcgcaggcgggtgatgatgagaggggccacagccgcagccccacgcaggggagcccaccactaaccctgcacccccacccctgcacaaaagagctggtgggcactagccatatcgccttgcaaccttcctcggatgcagaatccactccttcaggcatcctcttcctccaatgctctgaaggcctggggagcctgagagatgcccgctgcacccaggcagggctcgcctttgtttgccagtaatgggaattactcatatcttgtgcccagtgcccagcacagggactcatcgaatccacccctcagttaacacaagtgtctcttacaagacctccattttctccagccaggagatgggaagtcccaaccttgtgctaaagtctctggggcctctgcttccccatcagggctttctgcctctgctgtgggcaggttacctttatgcctcggaagagtgcagacctccatgcagcgggtgaggctgccagcctaggtggggtgtcattgaatgtcatgaagggagccagccttcatgcactctgcctgcgtctcctgaacagctttggaccaggagttgctaccttgtgcggagaacgtgtggtgcataagaacaaccgagcctctgctcttcgaaaatgtatattctggccaggtgcggtggctcacgcctgtaatcccaacactttgggaggccaaggtgggcaggttgcctgaggtcaggagtttaagaccagcctggccaacatggtgaaaccccgtttctaccaaaaataaaaaaaatagctgggtgtggtggtgcatgcctgtagtcccagatgcttgggaggctgaggcatgagaatcgcttgaacctgagaggaggaggaggttgcggtgagctgagatcacaccactgcactccagcctgggaaacagagcaagtctctgtctcaaaacaaaacaaaacaaaacaaaacccagtatattctaataaggaggagcagagaatcaacaacaacaacaaaaaagtgtaaataatttcaattaatagtaagtgctgtgggtcaggcacggtggctcacacctataatcccaacatttttcgaggctgagatgagaggctcacttgagcccaagaattcaagaccagcctgggcaatagagagataccctatttctacaaaaattacacagattagcagggcgtggtggtaggagcctgtagtctcaaccactggagagaaagaggtgtaaggatcacctgagcccgggagttcaagactgcagcgagctgtgattgtgccattgcactccagcctggatgacagggaaaactcctgtttcttaaaaaaataagtaaataaaataaacattaaaaacagcaatagcaagaaatacatataggccgagcacagtgattcgcacctctaatcccagcactttgggaggccaaggtgggcggatcacctgaagtcaggagttcgagaccagcctggccaacatgttgaaaccccgcctctactaaaaatacaaaaaaaaaattagccaggtgtggtggtgtgtgcctgtaatcccagctacttgggaggctgagggaggagaaccacttgaacctgggagtcggaggttgcagtgagccaagatcgcaccactgtactccagcctggcaacagagcgagactccacctaaaaaaaaaaaaaaaagaaagaaagaaagaaagaaagaaagaaagaaagaaagaaagaaagaaagaaagaaagagaaagaaacacatagggagcttttcttgtgccccagcactgtgtttagtgctgtctatgcattatctcataatgtggaaaagccatagcggctccatttcacagatgagaaaaactgaggcccgcaggtgagatcactcatgcccactggtctgccagctggggagtggctgggctagagttcaaacccacttccagtccgactgcacggcctgcactctccaccctaccatcttccacagtctccttgaattcctccagggcgaggccacgccagcgcacaactgcagggggcgccgttcccacagcagccctgcaaagtgagtgtgcctgagaaacttccgcctcccctgcacccagccctgtttagggcacgaggctgaatcaatggtaagtgaccatctaatggacccacaacacggtgacctggggacagtcatttctttctttttttttttttttctttgagacagagtctccctctgccgcccaggctgcagtgcagtggcgccatctcggctcactgcaacctccgcctcccaggttcaagcgattctcctgcctcagcctcccgagtagctgggattacaggcgcacgccaccacgcctggctaatttttgtattttcagtagaaacggggtttcaccatgttggccaggctggtatcgaactcctgacttcaggtgatcctccctcctcggcctccgaaagtgctgggattacaggcgtgagccatggcatccgacctggggacagtcatttctttgcctgcacagactttttgggggatgccacccctcacccctgctccctttgcaaggagaagtgccaagaagacctttcccaactcccccaccccccattctctaaggaatgaggccatcttgccatttatttatttatttgtccgttgttttgtttttaaatctctgatgcgccatcagaaaattatttctgcctctgcccctggcgtggctttcggagatgcttgtctgtcagccaatggggaggatcggattctggcagggggctgtgcttttccgtcaggccgccaccccccaccccctcctccctgcacacaaaagcagcataaattaaccgtcttcgggaagccgagcctctgccagccctgagctgggaagaagcagctacctcggaggcagggcgcgcaggcgggcggcgatgagagggggcgcagccgcagccccgcgctggggagcccaccgctaaccctgcaccccacccacccctgcacaaaagagctggcgggcgctggccacgtcgccctgggtgaccttcctcggatgcagaatccgcccctgcgagcatcctcttcctcctaggctctgaaggcccggggagcgtgagcgatgcccagctgcacccgggcagggctcgcctttgtttgccagtaaggaggagaggctgtctcagctgcagaggtgagtgcgcgcatctccccttctcccaggataaaccgtctccctggaaggtttatccggcagcctttgccgcctctaaatccctttccagcagatggggcgggtgggagcagagagccacggtcttgtgactccgtgaaggccctcacatccctgttcccggtaccagggaaaaccgttccctgagctgcgcccagcaacacagtttaccttccgcgcgcaccgttcccctctaagtgcaccattttcaggacacgctgagagctcgggcggatgaaaacctcagcttctctctgggacgctgaaatagacccatcctagccctatgtatttcctatttataacgctaggaaggccaccagccgacgatttcgggaaaaaaaaaaaaaaaaaatctaagtgtgtcgataaaggctgtcctgtggggtggggaggaagggggtggtttatggtttaagacacagatgcctcctccttattggaactcgtatgtgatttgttaataatcagacatcagggctcaaatgagcgcttcactcccgttccttgatgtcactgtcttcttttggccgtccccaaatgcgaagccaggatctgagtgcaggagtgtccggggcccactgaggacccaccccaccccatccttagaagactgtggagtcaacgcctgtggctgcagctggcagggggtgggggtcgggggcggggctggtgggagtgttcctgggggctgaggtcacacccagctcagtataaggaagggagaggcgaagaccccttcctccggagagcaaatgcgtttctactgccgaggagaacttaccctcgcgggaagggcctggctggctgctgccaccgccccccccccgaccccatagcatccaggagggattttttttttttccatgctgcgtgttactgtccctcctccaagcatgaatgacgacattgaggacagagaatcgagtgagaaacgctcaccctgtacgggggagggtctagttttagccgtcccctccccccacttcctcatctggctgaggctgcctctgggtccttccttgctaagccacagtcccctgtccccgatgcaaacccgatatctatgctggggggctgcaggtaacctactccacagagaggcagcctggatgccatgagagttgggggccttagatgcttcatgtatttggtttttttgagacagggtcttgctatcttgcccgggctggtcttaacctcctgtgctcaggcgatcctcgcaaagtgctgggattacacgtgtgagccactgcccccagccagatgctttatcttttattttattttttgaagtagggtctctgttgctcaggctggaaagcagtggcatgatcatagctcactgcagtctcgacctcctggtctcaagcgatcctccaacttcagcctcctgaatagctgggacttcaggcaccaggcacccatcaccatgtttggttaatttttgtatttttttttttttaagagatggggacttgctatgttgcccaggctggtcttgaccttccaggctcaagcgatcctcctatctcagcctcccaaagtgctggggattacaggtgtgagccaccgcaccagccagatgccttattttattttattttattttctgaaatagaacctcactctgttgctcaggctggaatgtggtggcacaatcatacctcactgcagcctccacctcctgggctcaggcaatcctcccacctcagcctcctgaacagctgtgacttcaggcacccaccaaatttaattaatttttgtttttgtttttgcttttcgtagagatggtgtcttgctatgttgcccaggctggtcttgaccttctgggctcaatcctcccacctcagcctcctgaatagctaagacctcaggcacccaccattgtgcttggttagtttttgtattttttttttgagagatggggtcttgctgtgttgcccaggctggtctcgaacccctggtctcaagtgatctgcccaaagtgctggaattccaggcatgcaccactgcacccagcccctagacgctttaaaaagtggatctagtggcccggcagggtggctcacacctgtaatcccagcactttgggaggcaggtggatcatgaggtcaggagttcgagaccagcctggccaatatagtgaaaccccatctctactaaaaatacaaaaattagctggacgtggtggcacgcgcctgtagtccaagctactcaagaggtggaggttgcagtgagccgagatcgcaccactgcactctagcctgggcgacagagcgagactctgtctcaaaaaaaaaatgacaacaaaaaaagtggatctagctactcggaagctgttgagagacagacagaggtaatggaaggacagagtgtacaatactctataatgactgccggacacaggcctgaaatcctttcgcaaacacgggaatgcacacagaaatgactattgcctttaagacaaggtttctccaccttggatctatggatatttgggacccagtcattcttggtcatgggcggccatcctgggcactgtaaggtgctgagcagcacccctggcctgcccagggggcactccttcccctcagttgtgacaaaagtgcctctagacaatgccaagtgtccccttgcagcaggggaggcagaattgtccacaggtgcaaagcactggtttcaaagcccaaaacagatggggttggttgagtcataagatgctggtatgttatgtccaaaaggtatcttagaggtcatctctaattcaactcttttgtttacagaaagggaaactgagacccagagagggagatggtctgagagtctgccatgccccagagcagaccacaactcagtctcacctggcagctctgatcctggcccccacccagactgctcccccctgccctgcccctgcccctgcccccagtgagctcctcagaacaagaaaaacaaaactggtgtggggggtggggcggcacagtggctcacacctgtaatcccagcgctctgggaggctgaggcaagaggatcacctgagcccgaaagttcaagaccagcctgggtgacataccaagatcagagaaattagccaggcatgatggcacacactcgtggtcccagatacttgggaggctgaggcaggaggatcgcttgagcccaggagttggaggctgtagtgagctgggatcacaccactgcactccagcctgggcgacagagcaagaccccgtctctaaataaataaataaataaataaagtggcattttgtggtagtaaagatgagggtctcctttctaaccccagtctctttccacactgccttagtgagccctggagtcagaaagtcactaggacttgcttgagggaggacagagaggcaggacaggtggcctggtacatatggcagatagcgatgggttagagcctactggattctctttgaacttggcattcccagcacggaagctgaagtatatcagccattcacactttagtatgaatgactgtttggatttcttgctttctagttgaggtccaaggcacaagagggagggtaagtctatctgggtcatggctcaccctggagaaggtagatttcgaagtttccaagggagcaggacttgtatctgaaggctcagcctctcgcccacgttcaaactctgaaccccactgtgcatcctaagctctctgtgcctctgttttctcatctgtaaaacaggggaacctcatggggctcggtgatggttcaataagaagtgctggccgggcacagtggtttacccttgtaatctcagcgcttagagaggccgaggcaggaggattgcttgagcccaagagtttgagaccaccctggccaacatagcaagacccaatctcttaaaaaaagattttaaaaaattacccaggcatgatggtacacacctgtggtcacagctactggtggggggctgaggcaggaggattgcttaagcccaggagttcaaggctgccatgagccatgattgtgcccctgcactccagcccaggcaacagagcaagatcatgtttttttttttaaaaaaaaaaaaaaaaaaaaaaaaaacagccaagctcagtggctcacccctgtaatcccagcactttgggaggctgaggcgggtagaccgcttgagctcaggagtttgagaccagcctggccaacacagtgaaaccccgtctctattaaaaatacaaaaattagccgggtgtgatggctcaagcctgtaatcccagcactttgggaggccaaggcaggaggatcacctgaggtcaggagttcgagaccagcctggccaacatggcgaaaccctgtctctactaaaaatacaagaattaaccaggcgtggtgatgggtgcctgtaaccccagctacttgggaggctgaggcgggagaatcgcttgagcctggaaggtggatgttgcagtgagctgagatggcaccattgcactacagcctgggcaacagagcaagactccgtctcaaaaaagaagaagaagaaggagaaggagagaggagaggagaaaggagagagggggaggggaagggggagggggagacggagggggagtgggagggggaagagctgcatggggtagacgattgtcattaggactattgtccagtaaaacccattcctctgcggcttcctttcaggggtcatccctgcttcaagccagtgcctcttcccagctcccatggggaccaccgaagccacgctccggatggaaaacgtggacgtgaaggaggaatggcaggacgaagatcttcccaggtaggacttccacatccctgagtcaaccgttgggggagcaggtgtctctcccaggtgggacacaggagcggcccgggtctctctctaagtgggaaccgcccggggctggcctggttccatctccgcgtcctcctctcccgcacactctgggaggcctgaggccctgtgtgcgagtcttctctgtggcctcacagtggggtagtcctggccaggcacataatgggtatttgctcaatgatttaagattcatttctgtcttccctgccccaaagctccaaaggaccccccacccctacaccattttaagagttcttaacattctggctgggcgcggcggttcacgcctgtaatcccagcactttgggaggccgaggtgggcggatcacttgaggtcaggagttcgagaccagcctggccaacatggcaaaaccgcgtctctactaaaactacaaaaattagctgggcatgccgggcgcagtgactcatgcctgtaatcccagcactttgggaggccgaggcgggcggatcatgaggtcagcagatggaaactatcctggctaacatggtgaaactccatctctactaaaaatacaaaaattagccgggtgtgtggcaggcgcctgtagtcccagctactcgggaggctgaggcaggagaatggcgtgaacccaggaggcggagcttgcagtgagccgagatcgcgccactgcactccagcctgggcgacaggtgagactccatctcaaaagaaaaaaaaaaaaattagctgggtatggtgtcatgcgcctataattccagctactcgggaggctgaggcaccatggtgatttattagcagcctttaggagacacttacctcccctaacatgctgaacttttttttttttttttttgagtctcactctgtcccacaggctggagtgcagtggcacgatctcaggtcactgcaacctccaggtcctgggttccagtgattctccttcctcatgcccccgagtagcttggattacaggcacccgccaccacatctggctgatttttctatttttagtagagaccggatttcaccatgttggccaggccagtctcgaactccgaaagtgcttggattccaggcaagagccaccgcgcccggcccctacgctgaacattttgcagggacatcttgtctacactctgtctccccaccacacggagcgccacaagagcaggggtctttgtttagctcactgctgtatcccaacctaaggatagtgcctggcatacagtcggcgcttaacaaatattgggtgacaggtgctgatcactggtcagaataagaaatcacaggggctgggcacggtggctcacgcctatgatcccagcacttacagaggctcaggctggggggattgatagagctcaagagttcgaaaccagcctgggcaagatagtgagaccccatttctaccaaaaaaaaaaaaattagctgggcatggtggtgtgcacctgcagtcttagctacttggcaggctgagacaggaggatcccttgagcccagaaggcagaggttgcagcgagccatgattgcagccctgcactccagtctgggtgacagagcgagactctgtctctattttattttattttttttattttatttatttatttatttatttttgagacagagtgtcgctttgtcgcccaggctggagtgcagtggcgcgatcttggctcactgcaagctccgcctcccgggttcacgccattctcctgcctcagcctcccgagtagctgggactacgggcacccgccaccacgcccggctaattttttgtatttttagtagagacggggtttcaccatgttagccaggatggtctcgatcgtctgacctcgtgatccgcccacctcggcctcccaaagtgctgggattacaggcgtgagccatcgcgccctaccacctgtctctatttaaaaagagaggaaaaaaaaaaaaaaggccggtcgctgtggctcaggtgtgtgtaatcccagcactttgggaggccaaggtgggcagatcacaaggtcaggaatttgagaccagcctggccgacatagtgaaaccctgtctctactaaaaataaaaattaaaaaaaattagctgggcatggtggtgcacgcctgtaatccccagtactcgggaggctgaggcaggagaatcacttgaacccgggaggcagaggttgcagtgagccgagatgtgccaccgcactccagcccgggtgacagtgtgagactccgtctcaaaaaaaaaaaaatactacatggaaaggaagctgtgcgaatttgctgttgagacgtgtgactctgatttgctggctaaagatagctgctcatccctcttccctttcagaaccaggaattcatccatcccccaaacacaatgcccaagggtcagttatagaaactattgggtgaggttcagtcaaaaagaccaggtgtgttccgcctgaaaaagagaattggaaaagaatctccaggccgcgcacagtggctcacgtctgcagtcccaacagtttgggaggccgaggcgggcaaatcacttgaggtcaggagttcgaggccagcctggacaacatggtgaaaccccgtctctactaaaaatacaaaaattagtcgggcgtggtggtgggcacctgtaatcccagctactcaggaggctgaggcaggaaaactgctggaactcgggaggcgaaggttgcagtgagccgagatcgcgccactggactccagcccgggcagtagagtgagtgagagtgtctcaaaaaaacagaatctccagttccaggaaaatttcaatctgagagggttccggagggcagaacgaggccaaaagaacgaacttaaaagagaatggggtttgaaggagatacagaagaatgccttgaagtaatcggtctccttcaaaatgagtcaggctggtgtgggaggccgagagcttccttcccattcatgtccaggcagaaggaggactgttgaagacggcatcttgatattcaagaacttcagccctctcctgaatccagtcattgccaggcctctaaggcccatgcacctgtctgtgtttctttgcagcaggaggtccctgttctcagaatagccgagaatcagagaatcacggctgggagcggaggctgatgtctgtaatcccagctctttgggaggccaaggcgggaggatcgcttgagcccaggagtttgagattagcctgggcaacatagcaagacctcgtctcttaaaaaaacaaaaaacaaacaaaaactggctgggcctagtggctcacacctataatcctagcactttgggaagccaaggctggcagatcacctgaggtcaggagtttgagaccagcctgaccaacatggagaaaccccgtctctactaaaaatacaaaattagccgggcgtggtggcccatgcctgtaataccagctactcgggaagctgaggaaggagaatcgcttgaacgcgggaggcggaggttgcagtgagccaagatcgcaccactgaactccagcctgggcgacagagtgagactccgtctcaaaataaataaataaaaataaaaaataaaaaaaaattagtcaggtatgctggtgtgcacctgtagtttcagctactcaggaggctgaggcaggaggattgtttggacttgggacatcgcagcagtgagctatgatcacaccaccgcactccagcctggacaacagagcaagactgcatatctaagaaaaataataataattttaaaataatgtcatttcaagcagcacagcataaacaaaggcgcataagctttggaatcggacgcccatggttcaaatcccaattccccagcaggtttgctctgccacctgggctacctctttgggcatctcagtgcctctgttttctgatctgtaaaataggacaataatctctcgcgcaccaggtggtcatgaaattttgataaaacagccgagatgggctgtgcaaatggcgaaggcagcacaaataaataatcatctccagcgttattactattattagcttagctccctttccccctactgatttttttttatttctttacttttcttttctttttttttttttgagacagagtctcgctctgtcacccaggctggggtgcagtggcgccatctcagctcactgcaacctccacctcctgggttcaagtgattctcctgcttcagcctcccaagtagctggattacaggcatctgccaccacgcccagctcatctttgtatttttagtagagacgaggtttcaccgtgttggccaggctggtctcgaactctcaacctcaggtgatctgcccacctcccaaagtgctaggattacaggtgtgagccattgggcccagctccacctataattttttttttttttttttttttttttttttttgcagacaaagtctcactctgtcacctaagctggagtgcagtggcgcgagttcggctcactgcaacctccacctcccgggttcaagcaattctcccacctcagcctcccgagtagctgggattacaggcacacaccaccacacccagctaatttttgtatttttggtagagacggggtttcaccatgttggccaggctggtctcgaactcccaacctcaagtgatccgcctacctcggtctcccaaagtgctgggattacaggcgcaagccaccacacccggcctccaccgataattttaaaagctctcatctcacccaagccttcttgagacaaaaaccaaggccgagcgcacctgcaaatgcaagctggaggccctttctggaaggcgcgaggccagcgggagcgggaggagggtgtgtttctggtggatttcttacagctgcaaggcttctcgcccacccgctgcagcagctttgtgtttgcaggacagtggcctcgctgtgccagcctggcccccacgagctacgcctttgccaacaggacacttcctccacgaggcttctgtcttcctcgtctctggaagaactgagtcggctcctcggtgcaggtccagctgcggccacacataaccacctctgtctgccgcaaaacagctcacaattctgtttcttccagcccagccatcccctcccctggggactgcagaagtggtctttgtactgcccttaagggtgtcagacagagccctgcatggcctctgcccttctagcacttttttttttttttttggagacagagtctcagtgtatcacccaggctggagtgcagtggtgcaacctcagctcactgcaacctccacttcctggtttcgagcaattctcttgcctcagcctcccaagtagctgggattacaggtacgcaccaccatgcctggctcatttttgtattttcgttagagacagggtttcaccatgttggccaggctggtctcgaactcctaacctcaagtgattcgcctgcctcggcctcccaaagtgctgggattacaggtgtgagccacgcgcccggcctccttctagcattttccttcactctcacccttctgcagcctactacggagctagagctgaaggcagcccggagattgctgcctcaatttctccattcattcattctgatgctatgcgccaactgtataccagtcccttatagcctcacaacccaatacaaggtggcagctgggttcatggcacttctgaccaggccagggagggaaggggagctgtgattcttggctgtgaagggtgaggagggatgagccggggaaggaagtggggtgtaggggccccacattccaagcagagagggcagcatgtgcaaaggctctgggctcagtggaagcaggttgagggactggggaaggctgcgtggggaaactgaggacttgggggaggagcttacccagggcatcctagccaaggagggtcagatgcagggtgagctgccccatagctccctctactctcttcccctcacagctgagtggctgccagttttgtttgcttgcttgtaactttttctttgtttgttttgggttttctggggggttttatttatttatttatttgaaacagagtctcgctgcaacgcccaggctggaatgcaatgacgtgacctcggctcgctgcaacctccacttcccaggttccagcaattctcctgcctcagcctcccaaatagctgagtttacaggcgcccaccaccacgcccagctaatttttgtatttttagcagagatggggtttcaccatattggtcaggctggtctcgaactactgacctcaagtgatccacccgcctcagcttcccaaagtgctgggattacaggcgtgagccaccatgcccagctgcttgtaactttttaattttttttttttttccagacggggtcttgctctgtcacccaggctggagtgcagtggtgcgatcatagctcactacagcctccacatcccaggctgaggcgatcctcccactgcagccccctgaatacctgggaccacaggcatatgccaccacacccagctatgttttattttctgtagagacagggtctcactgtgttgcccaggttggtctcaaactcctgggttcaaatgatcctcccacctcagcctcccaaaatgctgggattacaggcatgagccactgcgcctggcctatttgatatacttccaaacttggaaaaaaattacaagaatgatataaagaatatctgcatacctttagtaggattatacaattgttaacattttgctccttttatatcaaagtcagccctcagggctgggtgcggtgactcacatctgtaatcccagcactttgggaggccaaggcaggtggatcacctgaggtcgggagttcaagaccagcctaggccaacatggtgaaaccccgtctctactaaaaatacaaaaatcaactgggtgtggtggcgggcacctgtaatcccagctactggggaggctgaagcaggagaattgcttaaacccaggaggcagaagttgcaatgagcccagattgtgccgccacactctagcctgagcaacacagcaagactctgtctccaaaaaaaaaaatttaccctcaattgtaccgataatgtcccatgtccctatttagctaatgcccctgccccaaaccctgggtccaagacccaatctgggaccactcattgcatcaggttgagtatactgggttgtgtgtttactggggtatgtgtctcaccaggcactgggacttaaacttatctcttttaggggaacacgatccaacccacctcagcaggacgaagccacgctgtgcatcttgcatgtgggggggacccccacttttttttttttttttttttgagacggagacttgctctgtcgcccaggctggagtgcagtagcatgatctcagctcactgcaacctccgcctcctgggttcaagcgactctcctgcctcagcctcccaagtagctgtagctgggaccacaggcatgtgccaccatgccaggctaattttagtatttttagtagagacggggtttcaccatgttggccaggctggtcttgatcgcttgaccttatgatccacctgcctcggcctcgcaaagtgctgggattacaggtgtgagccaccatgcccggctaggatttccactttttacctggattgcccatcatggactttgagagccggctctgcagagggctaagtggatatattataccccagggccacggaggggatctccaagtctggagagtctgcggttctcctggagcttgcggaagtaacaggatctcacctgaccttggaaactgcagctccatgaacaggcggggagagcttgctccacccatgttccagagcagtgggtcttccttcagggagcctggagccctgccaggtcggcttctccagttctgcatgatcttaaacctttcctgaacatccactgcaactggcagctcagcctcaggacctcatcccatccccgaggcactgcctctccctggccctccctccctaccctccatcctccaaccactccctcctcccccactgctctctctgcgccaggcaccctgagtctgctttctgatctgcccttgaacttggcaagcttattccagtcccggagcctgggcctctgcagtgccttccatctggagtgctcttgcctggtctctgcaggacgccaacatcatgcttaaaagtctacacttaaaagtcgcttccagccaggcacagtggctcactcctgtaatcccagcactctgggaggccaaggcgggaggatcacttgagcccaggagttcaagaccagcctgcaagaccccatctgcagaaaaatataaaaattagctgggtggccgggcgcggtggctcacgtctgtaatcccagcactttgggaggccgaggcgggcaggtcacgaggtcaggagatcgagaccatcctggctaacacggtgaaaccccgtctctactaaaaatacaaaaaattagctgggcgtggtggcaggcgcctgtagtcccagctactcgggaggctgaggcaggagaatggcgtgaacccgggaggcggagcttgcagtgacctgagatcgcgccactgcactccagcctgggtgacagagtgagactccgtctcaaaaaaaaaaaaaaaaaaaaattagctggacatagtagtgtgtgctggtagtcccagctacttgagaggctgaggtaggaggattgcttgagcccaagaatttgagaccagcctgggcaacatggcgagaccctgtgtctgcaaaaaaaaaaaaaaaaaaaaactgtaaaaacctgaaaaattaaccaggtgtggcagctcactcctgtaatcccatcactttaggaagctgaggcaggagaattgcttgaaatgtgaagttcaagaccagcctaggcaccacagtaagaccctgtctctacaaaaaattttataattagccgggtgtggtggtgcacacctagggtcccagctactcagaagactgagacaggaggatcccttgagcccaggaatttgaggctgcagtgagctatgatttcactactgtgctctaggctgggcaacagagcaagaccctgtctcaaaaaaaaaaaaaaaaaaaaaaagctgcctcctcaatgaggccttccctgaccaccccacagatttttttctctctctctcctctcctttatttcattcattttctttgccgtaagcatcactatctgccttgttcacttatttgcttattgtcttcctttatatacatggtctcaagccaggaattgctttgcacaatcctgggaaccaccaagtccaaaatccacagggcaggctggaaactgtcaggtaagagctaatgctgcagtttttgtttttgtttttgagacggagtctcactctgtcgccaggctggagtgcaatggcacgatctcagctcactgcaacctccgcttcctgggttcaagccattctcttgcctcagcctcctgagtagctggggttacaggcatgcaccaccacacccagctaatttttgtatttttagtagagatggggtttcaccacgttggccaggctggtctcgaactcctgacctcaggtgatctgcccgcctcggcctcccaaagtgctgggattacaggtgtgagccaccgcgcctggcccccattttagtcatgaggaaaacagaggctcagggaggagaaggcaccacccagactcgtagcgctggatggagtggcagggctgggagttgtgctcagactctctgagactctcttaggcattcccaccctttctcctgctttcctcactttcccagtatgtgcagctgagatgctttctttttttctttcttttcttttcttttttttttttttttttgatagactcttgctctgttgctcaggcgggagtgcagtggtgccaatcacagctcactgcagcctcaaactcccggactcaaacgatcctcctgcctcagcctccttagtagctgggattacaagtgcatgccaccatgcctggctaatatgttgtattttttgtagagatggggtctcactatgttgcccaggctagtctcgaactcctagtctcaagagatcctcccacctcagcctgctgagtagctgggatcacaggcatgagccatcatgctgggctaatttttaaatttttagtagtgatggggtcttgctgtgtgggccaggcttgtcttcaactcttgggcttaagtgatcctccctcctcagcctcccaaagtgctgtgattaccggcatgagcccctgcgcccagtctgagatgctttctacagcttcacatttcagctgcagcccagcagtggtccacctagttcacagccaatgtagaatctgtgtggaccatccaatgttgtgaggttgaatcacatccctttttttttttttttctcgagacagagtctcactctgtcactcaggctggagtgcagtggcacggtctcagctcactgcaacctccacctcccgggttcaagcgattctcttgcctcagcctcccgagtagctgagattacaggcacgtgccaccacacccagctaattttgtgtttttagtagagacggggtttcaccatgttggccaggctggtcttgaactcttggcctcagatgatccacctgcctcggcctcccaaagtgccgggattacaggcatgagcccctgcgcccggcctgagatgctttctacagcttcatatttcagctgcagcccagcaatggtccactcagttcacagcctacgtagagtctgtgtggaccgtccaaggttatgaggctaaatcacatcttgagaatcgaaggcagtgccggctgcaaagcaatggggctttcctctggcgggaggagatggtggctggacagggaccctggctgggcaagtggttgtttgtttgtttgttttgagacggagtctcgctctgttgcccaggctggagtgcagtgtcacgatctcggctcactgcaacctccacctcccaggttcaagcgattctcctgcctcagcctcaccaatagctgggattacaggcgcccgccaccatgcccggctaatttttgtgtttttattagagacagggttttgccatgctgaccaggctggtctcgaactcctgacctcagatgatccacccgcctcagcctcccaaagcgctgggattactgaggcatgagccaccacgcccagccagaaatctagactttttgcatctcttcttcgacagcaaatggaaaatgtttttaaatgctgcatgggtgggacataactaggcttggtgcatcagccatcagcctgcaattttgcagcgctggtttgggttaaccttctgaatgagcaggtcagttcattcttcagtcctttctttgaagtttgctatatatatatatatatatagcaaaatctatatctatatctatatctatatctatctatatcgcctcgctctgtcatccaggctggagtgcagtggctcgatcatggctcactgcagccttgacctcctgggctcagctgatcctcccaccttggcttcccaaatagctgggactacagggacacgccaccatgcctggctttttattttttatagagatggagtctcgctgtgttgcccaggctgatctcaaactcctgggctcaagggatcctcccacctcagcctcccaaagtgctgggattacaagcgtgtgccacctcatgcccagccaaagcttgctttttaaaaaattgaggtgaggccaagtacagtggctcacgcatgtaatctcagcactttgggaggccgaggcaggtggatctcctgagctcaggagttcgagaccagcctggccaacgtggtgaaaccccatctctactaaaaacacaaaaatcagctgagcatggtggtgggcgcctataatcacagctactctggaggctgaggcacaagaatcgcctaaacccgggagatggaggttgcagtgagccaagattgtgccactgcactccagcctgggcaaaagagtgaaactccgtctcaaaaattaaataagtaaaataaaatttaaaaaatataaaaaattgaggtggaattctcataacatgaattcatcattttaaagttcatgattcagtggcagagtccattcataatgttctgcaaccccacatctatctaatttgaagacattttcatcaccgtgagaggaaatcctatctactaagtcagccccattttcatccctctcccccaaccccagtgaccacacatctacttcctgtgagaatttacgtgttctaaacatctcttttttttttcttttcttttctgttttgagcagggtgtcactctttcacctaggctggagtgcagtggtgcaatcatagctcactgcagcctcgacctcccaagttagagcaatcctcctgcctcagcctcctgagtacttggaactagacgtgtaccaccacacccagctaattgttttgtatttttagtagagacgggctttcgccatgttgccccgactggtcttgaactcctgggctcaatgaacccgcccgcatcagcctttcaaagtgctgggattacaggcataagccaccacactcagccaacatttcatgtaattggaatcacacactgtgtggccttttgtgtctggcatctctcactgagcatgatgtcctcaaggtgcatccatgctgtggtctgtgtcagagccctgttccttttcagggctaaatagtattccattgaatggatataccacatttgttgatccagtcagctgttaatggactggtgttgtttgtttgtttgtttgtttttgagacagagtctcactctgtccccaggctggagtgtagtggcgtgacttcagctcactgcaacttccacctcccaggttcaagtgatcctcttgcctcagcctcccaagtagctaggattataggcatgcgccaccatgtccagctaatttttgtatttttagtacagacagggtttcatcgtgttggccaggatggtctcaatctcttggcctcatgatgtgccctcctcggcctcccaaagtgccaggatgacaggcgtgagccaccgcgcctggccgtcaatggactcttgaattgtttccactttttggtttttatgaattatgttcattcaagtatgagttttcgtgtgaacagatgttttcatttcctttgggaatccgctccattttgatctttgccatgaacaggaggagggtgacatctgattcctcctttacctccaagccccatagatgcactggagacgcagtggttacgcaaaaacatttgatgaatagagaaaagagagggagggaaagggagagggaaaaagcataaatagattccgccccaaaaaggttaacagctcatgccctaagtggaacagaaatgagggaataaatctttttttttttttttttttttttgagagagagtctcactttgttgcccaggctggagtgcaatggcacgatctcggctcaccgcaacctccgcctccagggttcaagtgattctcctgcctcagcctccccagtagctgagactgcaagcacgcaccaccacgcccagataatttttgtatttttcagtagagactgggtttcaccattttggccaggctagtcttgaactcctgacctcaggtgatccgcccgcctcggcctccctaagtgccaggattacaggcatgagccaccacgcccggccaataaatcatttttttaaaggaaaggaacatgcattccaccgcccttccatctaaacagcttgccttgcagctgagccaggaatgctgagttacagagacgaattaagctgtagcctggctttccggagtcagcacgccctgccgctaggacctctggcagccccgtgcaaaatgttctgcccggaatggaatatttcccagggtagccaaggagccagtgctcctgggtcaaactcgggcagcacgggctgcggcttcaagaagtgatctggggccgggtgcggtggctcatgctgtaattccagcatttctgtctcaaaaagaaagaaaaagttgcaaagttagtacagataattcctgtagactgggaacctagtttctcccataattaacatcttatattagctgtgtatattttatatttgtcacaattgatgaatcaatattgatactattggttattgataatcaacattgatcaataacaatattgatcaatattggttattagttaccaaagtccatgcttttttagattttcaaagtttttcctaatgtcctctttttttttcttttctctctttttttttttaagagacagggtctcactctgtcatccaggctggggtgcagtggtgccatcatacctcactgcagcctccgcctcccaggctcaagcagtcctcccacctcagcctccagagtagctgggactacaggcaccaccacgtccagctaatctttgtaatttttgtagagacagagttacgccatgttgcccaggctggcctaatgtccttttccttctgccccacaaccccatccaggatcccagatgacatttagttatcacatctcctgacactcctctggactgtggcagtctccctgtctttcttgttttgatgcccttgatagttttgtttgtttgtttgttttgagatggagtctcactctgtcacccaggctggagagcagtggcacgatctcggctcactgcaacctccgcctcccgggttcaagcgattctcctgcctcagcctcctgatagctgggattacaggtgtcctccaccatgcctgcctaatttttgtatttttagtagagatggcgtttcaccatgttgtccaggctggtctcgaattcctgagctcaagtgatcctcctgcctcagcctcccaaagtgctgggattacaggcgtgagctgctgcgcctggcccatcctgtattttttggaatgacatcactatacacagcctacacagagttatccttcatcttttttttttttttttttttttttgagacagagtcttgctctgtggcccaggctggagtgcagtggcacgatctcggctcactgcaagctccgcctcctgggttcatgccattctcctgcctcagcctcctgagtagctgggactacaggcacctgccaccacgccccgctattttttttgtacttttagtagagacggggtttcaccatgttagccaggatggtctcgatctcctgacctcgtgatccgcacgcctcggcctcccaaagtgctgggattacaggcgtgagccaccgcacccggcctatccttcatcttcttgagggcagaactgtacataaactatttccaattcttctgcacaagaaatgtgtctcttctctcctgtttatttgttcagtgacttatttatatccgtatggactcatagacatttattttacatcttgggttataattcaatatttcattatttatttggttgcacaaactgttccagcattgacatagagatctcttctggttgactcaggtttttgtgggggttttatctatttatttatttttaatactttttgctgcatttgagagtcaacaactcatcagagaccaaatcccacagggtcgccctagagagaattcaacttactaacttatttcaaagtttttgaagtcatgtgatgctggggaaaaaccttcattctcctcaagccgtgcaaaaatctccaaaaggcttaatataaatttgattatctaaaagaagcccttcagccctgatgcgttataattttcttcctctgctaaagaaaaaacatgctgggcgggcgcggtggctcatgcctgtaatcccagcactttgagaggccgaggtgggcagatcacaaggtcaggagttccagaccagcctggccaatatggtgaaaccccgtctctactaaaaatacaaaaattagccgggcatggtagcgggcacctgtagtcccagtttacttaggaggctgaggcagaagaatggcctgaacccgggaggcggaggttgccgtgagccgagatcatgccactctactccatccagcctgggcgacagagcgagactctgtctcaaaagaaaaaaataaaagaaaaagaaaaaacatgcgcttgtggtggctcacgcccgtaatcccaacactttgggaggctgaggtgggaagatggcttgagcccaggagttcaagagcaacctgggcaacatagtgagaccccatctctacaaaaaaccaaaaaactacaaaaattagccagccgtggtggtgtgcacctgtagtcccagctactcaggaggctgaggcaggaggatctcttgagcccaggaggttgaggctgcagtgagccatgatcacgctactgcactccagcctgggcgatacagtgaggctctgtctccaaaaaaatgtatatatttaggtccagtgattctccagaactaaatgtgttttgcttttgttcttgtctgactcgcctggctggacctgtctgggccactccactgtcctctgcctgaatctctggtgcccggcgactgatgcctgttcctggatgggtccgcaggccactcccagaagagacgggggtggaactgcttggcagcccggtggaagacacatcctgtaagtttccacgtccacagaagggcggaaacaggctcagtgtttccgggtttcagccctgcctggggctgtaactgtagaaatgtcagaggccacacaccgtgggtagaatgttctgtcctggggtctatggtggaagtggccgtggtgggtgagagacacaatggatgatggcgctctcatgaagccagcacgctgtgttgctgtgtgtccctgtgctagtcactcagcctctctgtgccccaatgcctcatctactaaatgtaggtagcgagcttctcgcagagggggcatgtaaggattaaatgaggtgatgccaaatgccctggaggcacaaagtcagcacagccaagggtgcactgggaggctctgctatctggagctctaaacatatacattttaatgtgtaataccttatattagacccaaatatatacattttttgggagaccgggtcacactctgtcatccaggctggagtgcagtggcgtgatcatggctcactgcagcctcaacctccagggctcaagagatcctcctgcctcagccttctgagtagctgggactacaggtgcacaccaccatggctggctaattttggtagtttttgtagaaatgggatctagctatgttgcccaggctgctcttgaactcctgggctcaagccatcttcttgcctcagcctcccaaagtgctgggattacgggcgtgagccaccacgcctggcatgttttttcttcagcagaggaaaaaaatcataatgtatcaggctctgaagccccagatcccggggatgggagtcctgggcggccagaggagagttttagccgtaacctggcgattgcaacgtgcctccggaggcagggaaagggcccaggttggcaccgtggggagaggtggggtctggggaggacctggcagccagccccacttaacgacattcagttaagcagaatatggaaaataaacctgtgagggccaaacaaaatttttttggagacagagcctcactgtatcgcccaggctggagtgcagtagcgtgatcatggctcactgcagcctcaacctcctgggctcaagagatcctcctgcctcagcctcctgagtagctgggactacaggtacacaccaccatggctggttaatttttgtagttttttgtagagatggggtctcactatgttgcccaggctgctcttgaactcctgggctcaagccatcttcccaccttggcctcccaaagtgttgggattacgggcgtgagccactgcacccggccgcctgtctctatttaaaaagaaaaaaaaaaaaggcaggtcaccgtggctcacgcctgtaatcccagcactttgggaggccgaggcgggcagatcacgaggtcaggagtttgagaccaacctggccaacatggtgaagccccgtctctactaaagatacaaaaaaaaaaaaaaaaaaaaattagccgggcattgtggcacttgcctgtaatcccagtcactcaggaggctgaggcatgaggatcgcttgaacccaggagacggaggttgcagcaagctgagattgtgccattgcactccagcctgggtgacaaggcgagactctgtctaaacaaaacaaaacaaaaaaagattagtcgggcttggtggcgcatgcctgtaatcccagctacttgggaggctgaggtgggagaatcacttgaacctgggaggcggaggttgcagtgagctgagatcctaccattgtactccagcctgggtaacggagtgagactccatctcaaaaaaataaatacataaataaaacaaaataaattagcagactttggattaaagcaggcagccatctgtgatgtgggtgggcctcatctaatcagttgaaggttttaagagaaacagactgaggttcccccaggcagagacaattctgcctgcggacggttttgcaacatcaactcttccctaggcgtcccgcctgctggcctgccctgccgattgaggacttgtcagtctctgtgatcacacgagctaattccttaaaataaatttctccctctctctttttttccatacatataggaaaaaaatatgtatacacacacacacacacacacacacgtcctattggatttgtttccctggagcactctgattaaaataggagactatcctggatcctgtattatccaggtggcctgacatcgttacaggatcctcatgagtggagacaggagggtgagagtcagagaaagcctagaagaagatgggctgctttcacaatttgtctgcacaagagatatgtctcttctcctttatttatttatttatttatttttgagatagagtttcactctgtcacccaggctggagtgcaatggtacgatcttggctcactgtaacctccgcctcctgggctcaagtgattctcctgcctcagactcccaagcagctgggattacaggcgccaccactgtgcccggctaatttttatatttttagtagagatggggtttcgccatgttggccaggctggtctcgaactcctgacctcaggtgatctgcccgcctcggcctccaaagtgctgggattacaggcgtgagccaccgcacccggcccaaagtcaggctttgaactcatgtctgcccaatgtccaagcatccatccccttaatctctgaggcttgcccacaggacagaggttataacattcacccctgtcaggatgatgtcggtttaattctgcccacccccgccaatggcatggatacagaagggagcccaccctctcttcccattcctgcatgatgaaacagcttccaccaggtaggaaaatggggggaaggtaaaagagagaaagcaaagatgttttccatttttctcatttccctgcagctcctcccaacacgctaaatttcaacggagcgcatcgtaagaggaagacgctggtggccccagagatcaacatttctctggatcagagtgaggggtccctgctgtccgatgacttcttggatacccctgatgacctggatattaacgtggatgacatcgagacccccgatgagaccgactcgctggagttcctggggaatggcaacgaactggagtgggaaggtaaagttcagggtctctctggggcctgctggagcccaccccccccaccccacctttccgtctctggattcccataggctcagagagtcacaagtggggcaggggctctaagcagtctagccttaaacccaggagatcaagactgcagtgagacgtgatcatgccactgcactccagcctggacaacagagtgagaccctgtctcaaaaataaaatttttaaaaaagagagaggtggctgggcgcagtggctcatgcctgtaatcctagcactttgggaggccgaggcgggcagatcacgaggtcaggagatcgagaccatcctggctgacacagtgaaaccccgtctctactaaaatacaaaaaattagccaggcatggtggcgggcacctgaagtcccagctactcaggaggctgaggcaggagaacggtgtgaacccaggaggccgagcttgcggtgagccaagattgtgccactgcactccagcctgggcgacagagcgagactccgtctcaaaaaaaaaaaaaaagagagagagaggttggtgaatgggtaccaacatacagttagacagaaggaataagttctattgttcgatagcagaataggaggggtgccaggaggagggtccatccgctcctgcgactgttttttttttttttttgagacagagtctcactctgttgcccaggctggagtgcagtggtgtgatctcagctcactgcatcctccacctcccgggttcaagcgattcttttgcctcagcctcccgagtagctgggattacaggcatgcactaccacttccggctgatgtttatatttttagtagagatggggttttcccatgttgcccaggctggtctcaaactcctgacttcaagtgatacacccacctcggcctcccaaagtgctgggatcacaggtgtgagccacggcgcccagcctgcccctgcaatttgatgcatatttttcttgtgggcttgtgaatttttctgcagaacgtggctttcatcagaatctcaaaggcgaccaagatcccaacaaactgccctcgatgtatgcaacaaatactttttgaccatttactccagggcaagtcctgattcaggcgtggggtatatggcagggctatgataagaagagatggtcctggtccctacctgcacacacagatcatcagaaagacagaccacgaaaggccaggcgcagtgactcacgcctgtaatcccagcactttgggaggctgaggtgggcagatcacctgaggtcaggagtttgagaccagcctggccaacatggtgaagctccatctctactaaaaatacagaaattagccgggcatggtggcgtgcgtagtcccagctactcgggaggctgaggcaggagaatcgcttgaactctggaggcagaggctgcagtgagcagagatcgcaccactccactccagcctgggcgatggaacaagactctctcaaaaaaaaaaaagaaagaaaaaaaaaaattaaggacaatgtagtggctcattcctgtaatcccagagcttcgggaggccagggtaggaggatcgcttaaggccaggagtttgagaccagcctgggcaacatattgaaaccccatctctacaaaaatataaaaattagctgggtgtggtggtgcacaactgtagtcccaggtatctgggaggctgaggcaggaggactgctctctgtgtgccaggctcctgggagagtaaaaaccaagcatgcatgccccgagtatcctcgtggtttgatgaagcagatgcattcaccagctctgagaagctccaggacacaggtccttaaccaacagagtgccctgggaggccagcaaagggaatgtccagaaaggcttcctggaggaggcggcatttgagccaggccttgaaaggggagtaggagaggaaaatgggtcagcagggcagccaggtggggagaagcgaaggacttgtgggtcccggcagcgagggaggtgggagaggggaaggaaggctgagcaggagggcaggagatatccggactctggcgtccatgcgactctccgccacctgcttctagacgacacccccgtggccaccgccaagaacatgcccggggacagcgcggatctatttggggacggcacgacggaggacggcagcgccgccaacgggcgcctgtggcggacagtgatcatcggggagcaagagcaccgtatagacctgcacatgatccggccttacatgaaagtggtcacccacggaggtgagacccgccccccggtgcccccttggggctccagcccggcccactgggcaacagggggttcgtcagtgcccctctctgatgcacggggatgttaagccgtcaactcgcttcgggtggacggactgtgggcaaggcgtgcatggtcagggaggcgcactgggggcccctgatggtcgctgtcactcctcagcgaaggcagagactggctaaggggtcgccggctgctgtggctcggagccatgccctcccgagcgtgtgggcaccgggacgtggtgggtggtgcgcgggaggcagctcagggctgggagaggactctgacgttgccgatcggctgcctctcctcagggtactacggcgaaggcctcaacgccatcatcgtcttcgcagcctgcttccttccagacagcagcctccccgactaccactacatcatggagaacctcttcctgtgagtccccgcccgcggcgagcagcctcgggccagctctgatgcctccctggccacaggggcaccaggctgcaaggattgcattgtggccctaggaagcctgcctggcaccagggaagggcgtggtggccacagaccttgatctgagtccctgctggccctgaggctcacagtggccttccctctgggccaccctgttctcctccccgtcctcctcctcctcctcttcctcctccttcccctcctcctcactgtcctcctcctcctccccttcttcctcccccttcccctttcttctcctccttctcctccccttcttcctcccccctcctcctcccttttctcctcctcctccccttccctctcctcctccccctcttccccttccctctcctcctcccccctcttccttctcctcctcttcctcccctttctccacctcatcctctttctcttcctcccctttctccccccttcctcctccttctcctccttccctcatcttcctctccttccctctcctccccctccccatcctcctcctccccatcctcttccccttcctcctcctcttcccgctctgagatggcaccactgcactccagcctgggtgacagagtgagaacctgtctcaaaaaaaaaaaaaaaaaaaaaaagcaaggcctagagaccagcctggccaacatagtgaaatcctgcctctactaaaactacaatttagctgggctcggtggcaggcgcctgtaatcccagctactagggaggctgtggcaggagaatggcgtgaacctgggaggcggagcttgcagtgagccgagatcgcaccactgcactctagcctgggcaacagagcgagattccgtctcaaaaaaaaaaaacgactcaataaaagagtaactgccctatgaggatgcccgctgacactcatgtggagtgtgctgggatcatccacgtcctctcccaccctgcagtccgccaggacagcagacaacacctggaccagtggggctgacccagccagcggcaggagtggaggcaggcagggtcggcaccgcaggtgtcctgaccctggacccctccatgttgggtccctgccttctgtgccccgtgagcaggtacgtcatcagcagcttagagctcctggtggctgaggactacatgatcgtgtacctgaacggtgccacgccccggcggaggatgcctggaatcggctggctgaagaagtgctaccagatgatcgaccggaggtgaggtggggatgcctcaggaagcacagtgggggcatgaaaatcacacagggggctggacatggtggctcacacctggaatcccagcacttcgggaggctgaggtgggaaggtcccttgagcccaggagtttgagaccagcctgggcaacgcagcaagacgctgtctctacagaaaaacttttaggccgggcaagggggctcacacctctaatcccagcactttgggaggccaaggtgggtggatcacctgaggtcaggagttcaagaccagcccggccaacatatagtgaaaccccatctctactaaaaaaattcaaaaattagctgggcgtggtggcgcatgcctgtagtcccagctacttgggaagctgaggcaggagaatcacttgaacccaggaggtggaggttgcagtgagccgagatcatgccactgcacttcagcctgggcaacagagcgagactctgtccccatgaaacactcactccctattccttctccccaggctccggcaccccccatcctactttctgtctctgtaaatctgatgactctagggacctcctaggactggaatcacacaggatttgtccttttgtgtctggctttcctcactgagtgtgatgtcctcagggtgcatccacattgtagcctgtgtcagagcctccttccttttcatggctgcataatattccactgtatggacataccacatttggtttgtccattccattcatctcttgatggacatgggttgcttccacccctgagttattgtaaatagcctcagagtgacattaaaattgagccagccaatccatccttgcacccaggttagtggagggaggctccaaggacaggctggtccctcctagggcattaggtggtgaaaatacaatcttggctgctcaaataactaccaacctggttcacctgctctgcaccatggggtctctacctacctcatccacctgagggtcttagggactcaaagggtgtgtctttatcccaccataggacccccatgtcttggatgggggcagggatttgacaggtacctggagaccacacgtggaatgagcagagtgacgaatgcttgcttgtggctctcccgtcccacccagctcctccctccccagggctcgccccaggagcccatcttgcttcctttgcggccccacacaggttgcggaaaaacctgaagtccttgatcatcgtccacccctcgtggttcattcggactgtgctggccatctctcgccctttcatcaggtgagacggggaggctgcaacccaagtccagtggcctcagtgtgcgtgtgtgcgtgtgtgtatgcatgcatttgtgtgtgcatgtgtgcacgtgtgtgcgtgtgtgcatctgtgtgtgtgtgcatccatgtgtgtgtttgatgtgcatgttccagcttctctatgatgaatacatattattgctttaaacagttttaaattgcacacagccaggcacagtggctgacacctgtaatcccagctactcagaaggctgaggtgggaggatcgtttgaggccagcctgagcaacatagcaaaacccccatctctacaaaaaatacaaaaattagcaggacgtggtggtgcacacctgtagtttcagctacttgggaggctcacgtgggaggatggcttgagcccaggagatcaaggctgcaatgagccgtgatcgagccactgtactccagcctggatgacagagtgagaccctgtctcaaaagaaaatcagtcatgcatggcatcacatgcctgtagtcccagctactcaggaggctgaggcaggaggatcacttgagcccaggaggtagaggctgcagtgagctatgatcactccactgcactccagcctgggagacagagcaaaacaaccctgtctctaaaaataaaatatatatatatgtatgtataaataaataaataatatgactaataaatttaaaatttaaaactacatatattctataatgtatatcatatatagttactatattaaacatatagtaaaacagatcaagtgaaataaaattaggcatgttaaatgccctattcaatccaataaaatgtcatgcaaatttaatttaatctaatgcaaaacattgaattgaataaagattcctaatgttcacgttcccagttacaaatctgggatgagcgaaagagacgagggcttcactttcccttgaacaacaggacacattcacagcaggcccgattttcaaggaagactctttaaacatgctgttttcaaggactgctaagtaccctgaaggggcttatttgcatattagcgaaatgagatgaggaatacactaattatggatcattttagctaataatgaatcaacaggcaaaacggtaaacacgcatttcagtctaagataattgcatttgctcctctatattccagaattcagtaacatagactacctttgcctttaatgtagatattaggatggtgcaaaaataattgaggttcttgccatattttcattacaaaaactgcaatcactcttgcacgaacccaataattctgtcactcttcaccggtcgccatggctcacacctgtaatcccaacactttggaaggtcgagatgagaggatcgcttgagcccgggagttcgagaccagcctgggtgacatagcgagaccctgtctctacaaaaaaaaatttttttttttttcagacggagtctcactctgtcgcccaggctggagtgcagtggcgcgatctcagctcactgcaagctccgcctcccgggttcacgctattctgcctcagcctcccgagcagctgggactacaggcgcccgccaccaggcccagctaactttttgtatttttagtagagatggggtttcatcgtgttagccaggatggtctcgatctcctgacttcgtgatccgcctgccttggcctcccaaagtgaaaaaaatttttttttaaatacggccaggtgtggtgacccaggcttgtaatcccagcactttgggagaccgaggcaggaggatcgcttgaggccaggagttgaagaccagtctgggcaacatagcaagacctccatctctacaaaaaaaaattttttttaattagccaggcctggtggcgcgcacctgtgatcccagctactcagaggctgagggaggaggatcacttgagcccaggaggtcgaggctgtagtgagccatgattacaccactgcactccagcctgggtgacagagtgagactctgtctcttaaaaaaaaaataccatgaagtgctggtgatgaaacaccacatggtatcagatggccagaattcaggattggaagggaaagaagggaaagaaccattcatccctgaaaaacagagaattgggccaggcagggtagctcatgactgtaatcccagcactttgggagttagaggcaggcagatcacatgaggtcaggagttggagactagcctggccaacatgatgaaaccccatctccattaaaaatacaaaattagccgagagtggtggtgcatgcctgtagtcccagctactcgggaggctgaggcagggaaaatcgcttgaaccggggaggcggaggtggcagtgagccgagatcacaccactgcactccagcctgggtgaagagcaagactctgtgtcaaaaaataacaataacagagaatcaatgggcagccccgtgtgcccccttcttgtgcccagctgagtgttggctgtgccgtcctgtgcggtgacatggagagaaagcatccctgggaaaaattaacacagaggagcaacttttagagatgatgggaaaacagcctgtagagtctaagacaatctccccacctcctgacttccttccaacaagatcctcattgcagggacccatgtcaggtgcatggccctgcttgcaagggcctcggcgcagacccggggtctccactccatgcatggggtgcaagataattaaggctgtcatcgggcgggagggaggtgtcgtcgtctgcactggggcatcctggagtggggtcctgtggggatccctgtcgccatggctctgtctggacctaggtaacccccaccccatgggttgcatttcagacctctccctccttctccccccgccagcgtcaagttcatcaacaagatccagtacgtgcacagcttggaagacctggagcaactcatccctatggaacacgtccagatcccagactgcgtcctgcagtgagtggccccacagtccaccccgccgtattagtctgttttcgtgctgctgataaagacacacctgagacagggcaatttacaaaagaggtttaaggggccgggcgcggtggctcctgcctgtaatcccagcactttgggaggctgaggcgggcggatcacgaggtcaggggatcgagaccatcctggctaacatggtgaaaccccgtctctactaaaaatacaaaaaattagccgggcgtggtggcgggcgcctgtagtcccagctactcaggaggctgaggcaggagaatggcgtgaaccccggaggcggaggttgcagtaagctgagatcgcgccactgcactccagcctgggccacagagcgagactccatcgcaaaaaaaaaaaaaaagggctaacggactcacaattccatgtggctggcaacgcctcccaatcacggtggaaggcaaaaggcacgtctcccatggcggcagagaagagaaggaaatttgtacaggcaaattcccctttataaaaccatcagatctcatgagacttactcactgtcgcgagaatagcacaggaaagacctgcccccatgattcagtgacctcccaccaggtcactcccacaacaggagggaattatgggagctacaattcaagatgagatttgggtgaagagaccaggcaaggtggctcacacctataatcccagcactgtaatcccagcattttgagaggctgagacaggcagatcacttgaggtcaggagttcgagactagcctggccaagatggtgaaaccctgtctctcctaaaaatacaaaaattagccaggtgtggtggtgcatgcctgtaatcccagatactgaggaggctgaggcaggagaatcgcttgaacctgggaggcagaggttgtggtgagccgagatcgcaccactgcactccagcctgggcaacaagagtgaaactccgtctcaagaaaaaaaaaaaaagatttgggtggagatacagtcaaaccctgtcacccccaacacccccccaccgggtccccctggctaccaggagccagcaatgaggggaaacgcagacttggaagggaggaactagaacccacccattttatttcctggagcccctcagggaccccccggagcttggggaagggatgggcagcttcaagtcctgttgtttttcactgaatgtcatatcatcggcacctcccctaggttcatgctgcaaaaatctccttaaacgtacatttttttattgtggtaaaatacacgtaacatagaacttcccatcttagccattccttttttaattttatttatttatttattttttgagaaggagtttcactcttgttgcccaggctggagtgcaatggcgccatctcggctcaccacaacctccgcctcccgggttcaagcgattctcctgcctcagcctcccaactagctgggattacaggcatgagccgccatgcctggctaatttttttttttttttttgtatttttagtagagacagggtttctccatgttcgtcaagctggtctcaaacccctgacctcagatgatctaccggcctcggcctcccaaagtgctgggattacaggcgtgagccactgcgcccggcctatcttagccatttctaaaagcacattcgcatatttgtgcagccatcaccaccatcctctccagacctttcttttttttttttttgagatggagtcttgctctgttgcccaggctggagtgcagtggcacgatctcgggtcactgcaacctccacctcctgggttcaagtgattctcctgcctcagcctccccagtagctgggattaaggcacccaccaccatgcccagctaattttttttttttttttttttgagatggagtttaactcttgttgcccaggctggtctcgaactcccgacctcaggtgatccgcccacctcagcctcccaaagtgctgggattacaggcgtgagccaccacgcctggccgatttttgtatttttagtagagacggagttttgtcatgttggccaggctggtcttgaactcctgacctcagttgatctgcctggctcggcctcacaaagtgctgggattacaggcatgagccactgcacccggccctctccagaacgttctcatcttcccaaactgaaactctgtctccatgaaacactcactccccattccacatcccaacccctggcagcccccatcctactttctgtctctgggagtctgacgactctagggacctcctaggaatggatccacacaggatttgtccttttgtgtctgacgtctctcactgagcgtgacatcctcaaggtgcatccacattgtagcctgtgtcagaatgtccttccttttcatggctgaataatattccattgcgtgaatggaccacattttgtcaatccatttgtccatcaatggacaattgggttgtttccaccttttggctcttgtgaatagtcatgttatttatatgctactcacctatgaccgtagatgtacaaatatctctgtaagaccctactttcaattctaatgagtatatacccaaaagtggaattgctgataattctgtttttttgaggaaccaccatactgttttgttttgttttgctttgctttgcttttttgagacggagtctcactctgtcacccaggctggagtgcagtggcgctatcttggctcgctgcaacctccacctcccgggttcaagcaactctcctgcctcagcctcccgagtagctgggactacaggcgcccaccaccacacccagataatttttttgtatttttagtagagatggggtttcaccatgttggcctggctggtctcaaactccccacctcagcctcccaaagtgctgggattacaggcgtgagccatcgcacccagcctgttttttgttgttgttgttttgttggggtttttctggtttttttttttagacagagtctcactctgttgcctacgctggaacgcaatggcgcaatctcggctcaccatatcctccagcttctacgttcaagggattctcgtgcctcagcctcccgaatagctgggattacaggcacctgccaccacgcccagctaatttttgtatttttagtagagatagggtttcaccatgttggccaggatggtctcagtctcctgaactcagtgatctgcccgcctcggcctcccaaagttctgggattataggcgtgagccaccgtgctcagccaacacataaacatttataatcaaaaatgcatctatgggccaggtgtggtggctcatgcctgtaatcccagcactttgggaggctgaggccagaggatcgcttgagcccaggagttggaggctacaagtgagttcatgccactgcactccagtctgggctatgacagaatgagaacctgtctaaaaaaaagagaagaggccgggcgcggtggttcgcgcctgtaatcccagcactttgggaggccgaggtgggtggatcatgaggtcaggagtttgagaccagccaggccaacatagggaaaccccgtctgtactaaaaatacaaaaaattagctgggcgtggtagcaggtgcctgtaagtcccagctactccggaggctgaggcagcagaatcactcaaaccggggaggtggaggttgcagtgagccaagatcgcaccactgcactccagcttgggcgacagtgcaagactccatctcaaaaaaaaaaaaaaaaaaaaaaaaaaggaagaagaagaagaagaaaagaaagaaaaaagagagcttgtttctctgcttgaaaaggaaagggatttccccaaaaagtatatctcaggggaaaggaaggttgtgtctgacatctttttctttctttcagatacgaagaggaaagactgaaggccaggagggagaggtgtgtgcagagtggtttctgctggggctgggtcggggcagcggggggctgagctgaactctcagttagggcaacccggtgacttctgggcagcagggaccattgtcctgtgcagggctcaagacgctgcccttctggcaaggactttaaactcagacctgggttcaaatactggctcccgcattgagctgcaaggtaacattaagcaaataaaaagctaacaaccaccttggaggttattgtgcaagatgaggcacccttggcaaaaaaggttgagcacagacttcacgctccataaagcataaaagtcaagacgggcgcggtggctcacccagcactttgagaggctgtaatcccagcactttgggaggctgaggcaggaggattgtgtgaggtcaggagttggagaacaacctggacaacatggcgtaactccgtctctaccaaaaatacaaaaattagccaggcgtggtggtgcgtgcctgtaatcccagctacttgggaggctgagccaggagaatcacttgaacctgggaggcggaggttgcagtgagccgagatcatgccactgcactccagcgtgggtgacagagcaagactctgtctcaaaaaaaaaaaaaaataaattagccaggtgtggtggcatgcgcctgtagttcagctacttgcagggagactgaatcgggacgactgcttgagcccaggaagttgaggctgcagtgagccatgattgtaccattgcactccagcctgggcaacagagcaagatcctgtctcaaaaaaaaaaacaaaaaaaaacagcctttatcatgccaggtccaatgccagctttgagggaaacagaggcaaataagacagagtcttggtcccagaagttttctcaaatagcaaaggcagggaacatctcactggtttggaaaacaggtcccaggggacaggaaaaccagagaggccagtactagctgagagcccaccccttggcctggctgggctagtcacccttgtcacctcgttctctctgtccacagcgcgaggccccagccggagtttgtgctgcccaggtctgaagagaagccagaggtggcaccagtggaaaacaggtaggtgtgcaggggaccatgggcagagagctgacagtcacgggaggctgcctactcccttgggggaggctagagaggaagatgggtccttgttcagggacagaaaatggaactaagtggccggccatggtggctcacgcctgtaatcccagcactttgggaggccgaggtgggcagatcacatgaggtcaggagttcgagaccagcctggccagcatggtgaaacctcatctctactaaaaatacaaaaattagctggacatggtggctcacatctgtaatcccagctacttgggaggccgaggcaggagattcgcttgaacccagggggcagaggttgcagtgagccgagatagtaccactgcactcggcgacaaagtgagactccatctcaaaaaaataaataaacaaataaaataaaaataaaaattatcggccgggtgtggtggctcacgcctgtaatcccagtagtttgggaggctgaggtgggccgatcacaaggccaagagatcgagaccagcctggccaacatggtgaaaccccatctcttctaaaaatacaaaaattagctgggcatggtggctcgtgcctgtagtcccacctacttggaaggctgaggcaggagaatcacttgaacctgggaggcggaggttgcagtgagccgagatcagaccactgcactccagcctggcgacagaatgagattctgtctcaaaaataaataaataaataaatatcatccaggtgtggtgatgtacacctctagtccagctactcagaagggtgaggcaggcagatggctggagcccaggaggtcaaggctacagcaagctatgactgcactccagcctgggcaacagagcaagaccctgtctcaaaaaaaaaaaaaaagttatcatgatgttctcatattatcgcaatctcaatgttatcataatgatgaaaggtgacctttgtccaggtcccagcaggtagattcagactcccccaatccagtagaccctgagcaacattattggcttcattttatgttagtgaagggccttggccaatttcctcaaaactgtctgtttgggctcatttgttacgcagcagatgcacgctgacatctgttttgtaccagatacagcagtgtcggtcctcatagggcttacagcctccacgaacaggtagaaaatgcccaagaatgggcactgtggctcacgcctgtaatcccagcactttcggaggccaaagcaggaggaccatttgaggtcaggagttcgagaccaacttgggcaacatattgagactccatctctacaaaaagtttaaaagttagccaggcatgatggtgtataccttgtagtcccagctacttgggaggctgaggtgggaggatcacttgagcccggagctggaagctgcagtgagccatgattgcaccactgccctccagcctgggcaacataacaagaccctgtatcttttttttttttttaagacagattttcactcttgtcgcccaggggccagagtgcaatggtgcgatcttggctcactgcaacctccacctcccgggttcaagcgattctcctgcctcagcctcccgagtagctgggattacaggcacccaccaccacacccggctaatttttgtatttttagtagagacagggttttaccatgttggccaggctggtctcgaactcctgacctcaagtgatccacccacctcagcctcccaaagtgctgggattataggcatgagccactgcacccagccaagaccctgtatcttaataataataaataaataaaaataaaataagttaaagaaaaaaaagggaaaatgcccaggctcccaaaaataagcaaataacgcccagtctccgtctctcctccacaggtctgctctggtctcagaagatcaggaaacaaggtgggtgtgatgcagagtggtcttcgtgctgttttcaaaatgtccttcatggacctgtattagtcagggttctctagaaggacagaaaatcaaaccagctgccagcaaatataaagcaggcagggatcctaatcccaggaaaactgccccatgacttatcgggagtgggggatacggcaccgggaaggcagggaggtagtggttcccttaaccagtcaggccgtccttgcacaactccaggggggcaccattacctagaccaggatgcaaatgaggccccagagttatgcagtggagcggccctcagggaaaaacccacacagagccaagctccctgaagcccaggatatgataccacaaaagggtagactgtccacgctctgcctccgattctccacctggttctggatgccaagaaaagcctccctgtggccgggcgcagcgtctcacgcctgtaatcccagcactttgggaggccgaggcaggcggatcatttgaggtcaggagttcaagaccagcctgggcaacatggcaagaccccgtccctaaaaaaaatacaaaaattagccaggtgagccaagatcgtaccactgcactccacagcctgggcaatagggctagactttgtctcaaaaaaagaaaaaaaaaaggaaagaaaagaaaagcctccctgtgtgttgatgtccaagggtatcctcaggcacaatggtttgccagaaggactcacagagctcagcaaagctgtcatactcacagttatggtttatcacagtggcatggtttattacagtagaagggtacagttaaaaatcagcagagttgggtgtggtggctcatgcctgtaatcccagcactttgggaggccgaggcaggtggatcacttgaaatcaggaattcaagaccagcctggccaatatggtgaaaccccatctctactaaaaatataaaattagctgggtgtggtggcacacacctgtagtcccagctactcaggaggctgaggcaagagaattgcttgaacctgggaggcggaggttgcagtgagctgagattgcaccattgcattccagcctgggcaacagagcaagactctgtttaaaaaaaaaaaaacaaaaaaacaaaaaacttaacaaaaggaagaggtgcatagggctggatccaggagagatcgggtggaagcctgcaagtgtcctctcccagtggggttgtgtggacagcctttatttctcccagcagggatgtgtggcaaaacacacaaagtgctgccaactagagaagctgacccaagcctttctagccagggtgtttatagagagtcaactacatacacctggctgactgtctgcatggcttttcttagcctccagcccctgcacagatcaagctgatgccacgtggcccaagttccaaccctaagtcacgttgtgagtgttattagtccattctcatgctgctatgaagaaatacccaagaccgggtaaattataaagaaaagaggtttaattgactcacagttctgcatggctggggaggccccgggaaatttataatcctggcggaagccacctcttcaccaggcagcaggagcgagaagtgctgagcaaaggggggaaagccccttataaaaccatcagatctcgtgagaactcactaccacgagaacagcatggaggtagccgcccccatggttcagttacctcccactgagtaccgcccacgacaagtggggttatgggaactacaattcaagatgagatttgggtggggacacagcccaaccatatcagttagcatagactatctggcatgacccacatagacactccagccaggatgctccaagagtttagaagttaatcccaggagccagggaaggaccaaacttttctttagaatgtgtgggatttatccttgaccacacagtttttttgttttgttttgtttttgttgttgttgttgtttttgagatggagtctcgctctgtcgcccaggctggagtgcagtggcatgatcttggctcactgcaagctccgcctcccagggtcactccagtctcttgcctcagcctcccaagtagctgggactacaggcgtctgccaccacacccagctaattttttgtattttttagtagagacggggtttcaccatgttagccgggatggtctcgatctcctgacctcgtgatccacccgcttcggcctcccaaagtgctgagattacaggcgtgagccaccatgcccagctgaccacacagttttatacaaatctataagatggcctggccacatgccttactacccatgtgacccaggaagctccaagctaagaaataaacatcaaaaatggccttagaccagtgctgcttaaggggcactgagtaaaagttctcaatgtatttctgaaaagaccacctcaacccaagctctctggagatgagttcacatatacagacagaaaacacaaggaaatcatccaccatgagcaaaagacagcagagacaacaaacagcagaattagatcttgcctggagatccttaggtggataagatataataagcatgttttaacaattaaaaacacaaaagaaggaattgtaagaagcaatagatgaatggatgaatggataggtggataaatggatggatggatggatgagtggatggatggaaggatgtttggatgatgggtggatagatagatgaatgaatgagtggagggatgggaggatagatggatgataggtggatggatggatggataaatggatggatggatggatgggtgaaggttgactgtgtggatggatgagtggatgaatggatgggtggagggatggaaagatggactgatggagagatggatgggtaggcatatggatgggtaaatggtagatgaatggttggttggatgaatggttgggtagatgaatgggtgggtggatggatggatgggtagatggatgggtgagtgggtgggtgggtggatgagtgagtgactggatgggtgggcagatggatgaatggatgggtgggtgggtggatggatggatggatggatggatagataggtggatggatgggtgcatggatgggtggatggctagatgtgtgggtggttgtatggttggttggatgcatggatggatggctagatggatgagtgggtgggtggatggatggatggatggatggatggatggatggacagatggatgagtgggtggatggatgggtgggcagatggatcaatggataggtgggtggatggatggatggatggttgaatagatggatgagtggagggatggatggatgaatggatggatgtgtgggtgggtggatgggtggatggacggatgagtgagtggctggatgggtgggcagagggatgaatggatccctccattgagtgaatggatgggtgagtgagtgtgtggatggatggatggatggatggatggatggatggatgggtggatggatagatgtgtgggtggttgtatggttggttagttggggggtgggttgaagcctccctccaggctgattgaggttgccagtctccagggcctgttctgctgaggcaccaggaaggaggccctcagagccacacttagaaagtgggtggcaggagccgggccctgaagggcatgtgccactcttgctgctgggagttcacccacgctgggtgggatcattgttttggattacatacatgtagaagcgcattttgcacttttaacattaacagcaataacttggcctgtgtctttccctccctagcatgtcctgaggcgacgtgagcataacaaaggacatggaagaagattccagatgccagaaaacctctgtcagacgcccactggccccagatctcatcctgcctcatcctgagtcccaatcttccaagggtgccagcccctccgttcatctctgaaacccagcatccttttcagctgcttgaaaacattgtattttttttttttaacgatgcagtatttgtgcgttccagaaaagggcccagctctgagcccctcacccttccacactcacgaactctcagccgaggaaggcaagaagcgcagggggtggcccgcgtggcgtcggtggcctccgctcctgctcgcagcctctgtggtcagagctggatacaagattcaagacccttctcttgcttgtcacccgctccaggttggagccacagacacccaccgccaccccggctgggtctgcgtcctttcctgtgcctttccctccagaatgcggcctcagacctagaagctcaacccccctatgagggccacgtcctggggtagctcctgacctccgaccttatgtccaaatttcacacccatggtttttcatttgacccgcccccttctcgctcataatgacacccagctcctttgagaggatcagagcccattgcacaagaagagccgctgccaaccatccttgtcctccgattgcaaaatgacaccccagtaatctagaacattctcaagcccctttaactcagatgtcaagccaccgggcaaaccccgtcaatacctcccaccaaggaatgagatatgtggacctcactgctcccccaacccagcgtcaggctgggacacgccaacgctgttccgggttggaacagcagaggctcagaaactggctctgaaataggcagacctagcaagaggaagatacagggtatcgggcgtttgagtgtttcagaagtcattcgggaagataaatccagtgcgctggccgcagccacctgcattcaaagcttggaccagcgggttcttgttcgggaggcaaatttccctaggaaaaagaagacagacttttctaatgtggtccaaatgcggatcactggtcagatggactctagaagcactgagctccctgtctctggaagtatttaagaaaaggctgggccaggcacgatggctcacgcctgtaatcccagactttgggaggccgaggcaggcggatcacctgaggtgaggagtttgagaacagcctggccaacatggtgaaacctcatctctactaaaaatacaaaaattagccaggcgtggtggcaggtgcctgtaatcccagctacttgggaggctgaggcatgagaatcacttaaacctgagaggcagaggttacagtgagccaagatcgtgccactgcattccagcctgggcgacagagcaagactctgtctcaaaaaaaataaaaaataatcagggcacagtggctcatgcctgtaatcccagcactctgggaggctgaggtgggtggatcacctgaggtcaggagttcaagaccagcctggtgaacatggcgaaaccccgtctctaataaaaatacaaaaattagccgggcatggtggtgcatgcctgtaatcccagctactcgggaggctgaggcaggagaactgcttgaacccaggaggcagaggttgcagtgatccaagatcatgccactgcactccagcctgggcaacaagagcaaaactccgtctcaaaataaaaagaaaagaaaagaatggacagtgtttgcagagagttgctcacgagtttccctctaatcctaaatgtcttcatgtctatcagtctgagcagacggtgagtagggcgggcacattctccaggcccttcttcctagctctgtggttgacctctcagcaagtgctatccaggctgggccaaccagacccacaattaactgagcctcagtgaaagcgtccagtgcatcttgacctgagacagcaaggaattgcatttggggttattccaacgatgatggcagggaactggtggtatttagtgctgaggggcagtgatacagaaagatttgccctgtgggacagggtcctgcgcgagtcccatccccaaaagccagcagctcctgccatgaggaagacggggtttctgagcaggcttatgcctgcaggttcctgtggagccaccggctgtgacgggacacctctgggtctcagcattgccctggggaggctgggacatttagggacatggtagggttttaacatttgtttcccaaatgtcaaatcccgggcacaggggcaagaccctgtcccgaattcccaccccagtgaatggtgtcgctgccaaagccaacacaagatgacaaaagtggctgggtacggtggctcacgcctataatcccagcactttgggagaccgagacaggtggatcacctgaggtcaggagttcgagaccaggctggccaacatggtgaaaccccatctctactaaaaatacaaaaattagctgggtgtggtggcgcgcacctgtagtcccagctactcaggaggctgaggtagaagaatagctggaacccaggaggcagagattgcagtcagccgagattgcaccactgcactccagcctgggagacagagcaagactgactcaaaagaaaaaaaatgacagaagcctgattatcagactgcccggaggagacaggctccagcagatagatgccagccaggcccagctgccacgatttgtcccaggtgaccaaaggcacgcagctccagcatgaatcgttctaacccaacagtgacaagaactgctgggccttaaccgtcatggaagactggggccgcttccaagtcacagacaggagacggggacaggaaagaactcattccacccaatcggacacctaataattgagtgtctacagcagcaatcaagtgacaagtgaggccctacctgacccagaaggtgcctgccggctaaacattctgcccccaccagaaactccagggggtccgcccgttatgccgtggcccacccacgcccctttggatcaccagcagtcacagacaacaggcaggcgaaactgaagaccccaactcagccccagcggaccctccagagcaaaagaggcccccggcgaggccacctgtcggcaggcatgccgaggtcaaacagccggggccaccgttcccagctgggccacgacctgcaccgtccacagatgggctttgagatggatttgtatcagggtggggggtgtggtttggccaaaatgcaatggaccccgacccctcctcgtaaaaggatgttgggtttccctctggtgacacatgggatgcgtcataaaccctcccccaaagtcctggtcagcagcccatccttccaacgatgagttttgcggtttttcagaacagaaatgatcactacgattgacgacggtcgtgatgttaagacgtcgtctccatgagctttggggggacttttatgtggaataaagaaactatcactgagaagggaggtttgttccttttgagtactagtaacaggcagggcccagtggctcacccctgccatcccagcactttgggatgcggaggcgggaggatcacctgaggtcaggagttccagaccaacctggccaacatggtgaaaccccgtctctactaaaaatacaaaaattagccgggcgtggtggcacacgcctgtaatcccagctactcaggaggctgaggcaggagaatcacttgaacccgggaggcagaggctgcagtgagccacgatcacgcctgccagttctctccatccacccagtggggacactgtgcggtggccatgtcatacccaccttgatgtctctgtcaccagcaggtcccaaagtcatgctactgtgctccagttgtgtttatgccggcaggtgccctttaggggaaaaggtggggtcttcgtgggtggatggaggggacaaagagggtggagctggtgctgggatcctggggagccgctcccagtttggaggtgacagccccctcctttatcctactgcacggggtctctgattaccctgagaggtttcttgaaaaccccattcacggccaggcacggtggctcacgcctgtaatcccaacactttggaaggccgaggcaggtgaatcacttgaggtcaggagtttgaggccagcctggccaacgtggtgaaaccccgtctctactaaaaatactaaaattagccaggcgtggtggtgcgcgcctgtaatcccagctactcgggaggctgagccaggagaattacttgaacccagggggcgtaggttgcactgagccgagatggcgccacttcactccagcctgggcaaaagagactccgaaccccccaccaaaaaaaaacagaaaagaaggccgggcgcggtggctcacgcctgtaatcccagcactttgggagtccgaggcgggcagatcacgaggtcagaagatcgagaccatcctggttaacacggtgaaaccccgtctctactaaaaatacaaaaattagcccggcgtggtggtgggcacctgtagtcccagctactcaggaggctgaggcaggagaatggcgtgaacccgggaggcggaacttacagtgagccgagatcgtgccactgcactccagcctgggtgacagagcaagactccgtctcaaaaaaaaaaaaaaacaacagtaaagaaaacctcactcgctctttcattcatttcggggcacagggggtccagtccctcacaccactcccagcccaaggggtgggctcaacccagggacctggggccttcctggggaccaggaggaagggacctttctgatcagagaactaatacacaagcagccgtcagccaagccagcaggaggaggggtgtccccggcagagtgacccacggggagcaaggcctggggcagccagagaggggcctgagggccggatcggcgccaccagtgttgcagaaaaacccaggacgaaattaaagtcttcatcatttggtcactttctttttattatcataattacttttttttttttttgagacggagtctcactctgtcacccaggctggagtgcagtggcacaatctcagctcactgcaacctctgcctcccgggttcaagcaattctcctgcttcagcctcccgagtagctgggattacaggcgcgcgctaccacgcccggctaatttttgtattaagtagagatggggtttcgccatgttggccaggctggtctcgaactcctgaccgcaggtggttctcctgctttggcttcccaaagtgctgggagtacaggggtgagccaccgtgcccaggcttttttttttttttttaatcagggttttcctctgttgctcaggctagagtgcagtgatgcaatctcagctcactgcagcctcaacctcctgagctcaagggatccttctgcctcagcctcccaagtagctggtactacagaagcaggccaccacacccagctaattttttttttttttggtagagatggtggggggcaaggaggcgggggtctcacaacgttgcccagactggtcttgaactcctggcctcaagcgatcctcccaccttggcctcctaaaatgctgggattacagtagtgagccactgcaaacatttctttttttgagacggagtctggctctgtcgcccaggctggagtgcagtggcgccatctcggctcactgcaagctccacctcccgggttcatgccattctcctgcctcagcctcctgagtagctgggactacaggcgcctgccatcgtgcccacctaattttttgtatttttagtagagacagggtttcaccgtgttagccaggatggtctcaatctcctgacctcgtgatccgcctgcctcggcctcccaaagtgctggggttacaggcgtgagccaccgcgcccggccaaacagacacttttttaataaatcaagatgagagtcacttaatataaaattaaccatttttttgttttttcattctttttgagatgtagtctcactctgtcgcccaggctggagtgcagtggcgcgatctcagctcactgcaagttccgtctcccgggttcacgccattctcctgcctcagcctcccgagtagctgggactacaggcgcccgccactgcgcccagctaattttttttttgtatttttagtagagacggggtttcaccgtggtctcgatctcctgacatcgtgatccgcccacctcagcctcccaaagtgctgggattacaggcgtgagccaccatagcatacccggcctaaaattaaccatttttaagagtacattcttcacaatgttttgcaaataccacctctattaaattccagaacattccattaccccaaaagtaaatctgtccccagcagccacagtcatccccacccacctcccccagcccctggcacccacgcgtccccttcctgtcctcgtggattgacgtgtcctgggcatttcatgtaaatgggatcactgcaccgtggggcagtgaggtcgctaatcaataccctgggacctgggactgcttggggactggcaggcatttgtagcccctgtggcttctccctctccttcctgccggggtgggctggcacagggaggcctcccagaggtgccctgccagggcctttatctgggcatgtcactgtcacctgaggccctgggccacgtgccccaccaagaggctgccaggaaattcttgccaccgaaactgggccagaggtgaagcccaggagccgggctttcctgggtgcctgcttgagcacctggaggagctctggccacagacatagccaccccgctgcactgccacagatcctgtggctgactgctttttctgagctttcctcatgaataccccaagatttccagtccattttgcaaaagctcttgaagtccagggtcacaattctgttaacaggactcataaagtacatcattggtcgggcgtggtggcttaagcctgtaatcccagtactttgggaggccaaggaggaaggatcacttgaggccaggagttagagacccgcctaggcaatgtaacaagacctcatctcttaaaaattctctctctctttggtgtattgatctcttactgcatacagacatacaaacttggccatcctatcaccccaccttcctagtcacttcccatcctctgatcacccccctgctcctgggctataatttcccacttttccttgtattggtggaaagggagaagattgaattcaatctccctcccatactacaaaaccccatggtagtagtccctcacccgcctcaacaaagtcagccttactgttttaagaagcatcagaaaaattattttctggtggggagaggcgtcacatgcctgtaatcccagcactttgggaggccgagttggaggaatcatcacgtgaggccaggagttcaagaccaacctgggcaacatggcaagaccccatctctacaaaaaattttaaagttaggtgtggtggtgcgaacctgtagtctcagctgctcgggaggctgaagcagaaagatcgccccagtgtgagaagttgaggctgcagtgagctgtgatcacatcaccacactccagcctgggccacagagcgagaccctgtctcaaaaaattcaaaaatgtaggctgggcatggtggctcacacctgtaatcccagcactttgggaggcctgaggcgggcagatcacctgaggtcaggagttcaagaccagcctggccaacatggtgaaaccccgtctctactaaaaatacaaaaattatctgggcgtgttggtgctcgcctgtaatcccagctattggggaggttgacgaaggagaattgcttgaacctggaaggcagaggttacagtaagccaagatggtaccactgcactccagcctgggtgacagagcaaaactctgtttcaaatttatttatttttattttattttattttatttttttgagacggagtctcgctctgtcgcccaggttggagtgcagtggcacaatctcagctcactgcaacctctacctgccaggttcaaacgattctcctgcctcagcctcccaagtagctgggactacaggcgtgtgccaccatgcccagctaattttttttgtatttttagtagagacggggtttcaccatgctggccaggctggtctcgaactcctgacctcgtgatccgcccgcctcggcctcccaaagtgctgggattacaggcgtgagccactgcacccggctccatctgaaattaaaaaaaaaaaattaaaacatttaataagagaatactttttccctttaccagtagaagagagaagcagcagagtgtcattcctccccattaccccctccccgccccgccggcccccagtcaaatgactccacccacaaggcaggcacgggatgaatggtccctggtgtcacgctgagatcctgtggctgggcccccggtcacctgggcaaggctatcttgtgattcactgctaaggatcttaagcccaccttggccctgacctcgttggaaaacgaagctccccgcagggtcccggcctctagggctgctgtgcgggcgggggtgggtgagttcgcttccttgacgccacgagaaccagtcttaatgtcagggtcaggccataggacacagagagcgggatatttttagggagggaaaagtgtggggctgctgatctgagctctctggccaggaggagggaagagggtgggggtggagaggagggaggagggggtaagaaggggaggagaggggaggagggagtggagagagggcagggaggtgggaggagggaagaggcagccccctgcccggccagctcgtgactaatttaggcaaaaggcagcctggagctatttccattcggcggcgggaacaggtgccggcgcctccgccccatccccaggggccgcctcccccggggcggcctccaggctgccgagacctataaaggcgccaggttttctcaatgaagccgggacgcactccggagcgcactgcgtggtcgcaccctacccgggctgccttggaagtcgtccccgccgcccctccgcaccggcatgaagctcatcgtgggcatcggagggtgagcgccgggggacctggtgggcggccctgcggggcaaagccccctgtgcgcgcagagggggaggcccgggaatgaatggagggatgcctggcgcctgaggtcacctacacgccgcccgaggtcagagtgcagggaggattttctgccctgggggtctcggtgtccccagtgggaaggggggctggacactgagcccagtgtttcattttttaaatggaaatgattcccgccaccttccaattatactcagcataaaaaaaaaatagaccagacacggtggctcaggcctggaatcctggcactttgggaggccgaggcgggtggatcacctgaggtcaggaatttgagaccagcctggccaacacggtgaaaccccgtctctactaaaaatacaaaaattagctgggcacggtggtgcatacctgtaatcccagctactggggaggctgaggtgggagaatcgcttgaatccgggagatggaggttgcagtgagtgcgatcatgccacttcactccagcctgggcgacagagtgaggctgtgtctcaaaaaaaaaatcagtagggacagaaaattaactaaagctccagtgaaccctcctcccgcctcgtggctgtcctggctaaatcggggactgacacgtgggcaggtgggatggggtccccaaaatgtcattccacatgactgtgcctttggagcctctctcaggcgacctcaggctagaagagattcaaactctctgtaaccagcacggctggctttgtggggctcacacccccgcctcagaagggacgggagcttggtctaatgctagccggactccctcttgaatttcatattttttgttttttggggtttttttttttggggggggggtgttgttgttgccgtcgtagtttgagacagagtcttgctctgttgccccaggctggagtgcagtggtgtgatctcggctcactgcaagctccgcctcccgggttcaagcaattctcctgcctcagcctcccaagtagctgggattacaggcgtgaaccacatgcctgtctaaactttgtgtttttagtagagatggggggtttcaccatgttggccaggctggtctcgaactcctgacctcaagtgatccaactgtctcagcctcccaaagtgctgggattacaggcgtgagccaccgtgccctgcccctaatatttttcgagtaagaagcctcgaattttcattttgcactcagcgctgcaaatgtcacagcccacccggggcacaaaataacttggattcatgtcaggcactttctttttatttttatttaaaaaattattaatacctgggggcttacattttaaaaattgggttttaaattttataatacagatgggagtctcactatgttgcctaggctggtctgaaactcccaggatcaagtaatcctcctgcctcagcctctccaaatgctgggattacaggtgggagccaccacacctgagcaacattaggcatttttctaacctgcctcttctggatatgatataggtgtcctctttttccgtcagtcttttttttttttttttttttttgagacaaaatctcgttctgtcaccaaggctggagtggagtggcacaatctcagctcactgcaacctctgactcctgagttcaagcgattatcttgcctcagcctccctagtagcttggattataggcacccaccactacgcccagctaatttttgtatttttactagagacagggtttcaccaggttggccagtctgatcgcaaactcctgacctcaggtgatctgcctgcctctgcctcccaaagtgctgagattacaggcatgacccaccacgaccagctaaaattgtttatattatctatttatgtatttatttatttatttaaagacagggtttcactctcacccagactgaactgcagtgaggtgatcacagctcactgcagcctcgaactcccaggctcaggcgatcctcccatctcagcctcccaagtagctaggactacaggcatgcaccaccacacctggctagtttttaattttttgttaagatggggtcttactatgttgcccaggctagtcctgagctcaagcgatccacctgcttcggcctcccaaagtgctgggattacaggcatgagccaccgtgcatggccggtgctgttttatttttttaagccctgctgagactaaatcaatttccttatctgtaaacataggtgggccgggctcacacctgtaatcccagcactttgggaggccaaggcaggcggatcaccagaggttaggagttcgagaccagcctggccgacatggcaaaaccccatcgctattaaaaacacaaaaattagttgggtgtggtggcgcacgcctgtaatcccagctacttgggaggctgaggcaaaagaattgcttgaacctgggaggcagaggttgcagtgagccaagattgcgccattgtactccagcctgggcaacagagtgaaactccgtctcggaaaaaaaaaaaagaaagaaaccctgtctctactaaaaatacaaaaattagccaggcgtggtggcgtgtgcctgtagtcccagctactcaggaggctgaggcaggagaattgcttgaacccgggaggtagagcttgcagtgagctgagatcgcgccactgcactccagcctgggtggcagagcaagacttggtctcaaaaaaaaagaaaaagaatcagaaaaatcctgggagctgatttgcaggaagaccctgagacatggacaggccccggggagcccaggctgcacctcaggcccccttctgagcaccctgaccttcttggggggagcccaggcagtctcatgcacacgctgtctccccagcatgaccaacggcggcaagaccacgctgaccaacagcctgctcagagccctgcccaactgctgcgtgatccatcaggatgacttcttcaaggtgcccgcccttgcccggggaggtggagctgagaggggatgcagggtgggcagccaggcccggccagccccgccctccactgcccagtgcccgtgtgggctgggcactggctccactccctgcctgacccctcctggggtctctgggataaactgggccaggaaagtgagggacgggtgtcgtgttcccatttcctaagcacctatttcatacgcagcccattctcactggacatccctacagtggggaccccagttagatggatgggaaagccaccattcctccacagggccagccggctgtggctttctgggtgaataccctttattcctctccacctcccctttcccatctgcaaaatagactctgagcccagctcgctgtgtgggtgtgggtgggggtgagggctaatgagatgattgatggtctggggaaaatctgagggtcaggcagagcccccacgcctcagggacctcagcagctccagcaagggaccccctaagactccatcacccaggccgggggtgaggcaggaccgggcactgagcccgaggttcaggctcctctgtttcagccccaagaccaaatagcagttggggaagacggcttcaaacagtgggacggtaaggacaagcatcacctccaagccccactatcccccggggtccgccctcctgcaatgcccgctccccctccactattcccccggggtccgccctcctgcaatgcccgctccccctccactattcccccggggtccgccctcctgcaatgcccgctccccctccactattcccccggggtccgccctcctgcaatgcccgctccccctccactattcccccagggtccgccctcctgcaatgcccgctccccctccactattcccccggggtccgccctcctgcaatgcccgctccccctccactattcccccggggtccgccctcctgcaatgcccgctccccctccactatcccccggggtccgccctcctgcaatgcccactccccctccactattcccccggggtccgccctcctgcaatgcccgctccccctccactatcccccggggtccgccctcctgcaatacccgctccccgtccactgtccccccggggtccgccctcctgcaatacccgctccccgtccactgtccccccggggtccgccctcctgcaatgcccgctccccgtccactgttcccccggggtccaccctcctgcaatgcccgctccccgtccactgttcccccggggtccaccctcctgcaatacccgctccccgtccactgtccccccggggtccaccctcctgcaatgcccgctccccctccactgtccccccggggtctgccctcctgcaatacctgctccccgtccactgtccccccggggtccaccctcctgcaatacctgctccccgtccactgttcccctggggtccgccctcctgcaatacctgctccccgtccactgtccccccggggtccaccctcctgcaatgcccgctacccgtccactgttcccccagggtccgccctcctgcaatacctgctccccgtccactgtccccccggggtccaccctcctgcaatacccgctccccctccactataccccggggtccgccctcctgcaatgcccgctccccgtccactgttcccccggggtccaccctcctgcaatacctgctccccgtccactatcccccagggtccgccctcctgcaatgcccgctccccgtccactgttcccccggggtccaccctcctgcaatacctgctccccgtccactgtccccccggggtccaccctcctgcaatgcccgctccccatccaccgtcccctggggtccgccctcctgcaatgcccgctccccgtccactatcccccagggtctgccctcctgcaatgcctgctcccctttccccagtgctggagtctctggacatggaggccatgctggacaccgtgcaggcctggctgagcagcccgcagaagtttgcccgtgcccacggggtcagcgtccagccagaggcctcggacacccacatcctcctcctggaaggcttcctgctctacagctacaagtaaacatctgcaggctctggccccaggcatggccctctctgggcgggtatagccatctcttgtttttttttttttttttttttgttttgtttttttttttttttgagacaagagttttgctcttgttgcccaggctggagtgcagtggtgagatcctgactcactgcaacctctgcctcccagtccaagcaattttcctgcctcagcctcccaagtagctgggattacaggcctgcgccatcacacccggctaatttttgtatttttagtagagactgggtttcaccctattggaccaggatgttctcaaactcctgacctcaagccatccgcccgcctcggactcccaaagtgctgggattacaggcgtgagccaccacgcctggctcacatctccattttaatagtcaggagacccaggagcagagccaccacgggaagtcaggagttgggggcagagctgggatcaacccaagtctggagccaggcgtggtggctcaccagcactttgggaggccaagatggatggatcacctgaggtcaggagttcgagaccagcctggccaacatggcgaaaccctgtctctactaaaaatacaaaaaattagccaggtgtggtggcgtgtgcctgtaatcccagctactcaggaggctgaggcaagagaatcgcttgaacccgggaagtggaggttgcagtaagccgagatcgcaccactgcactccagcctgggcgacagagagagactccatctcaaaaaaaaaattaaaactaaaaactcaagtctgggacaaacagccacccttcttggggagactgagtctttcttctggaacctcagacttctcgggcagaccagtaacctaggctgcgccctctggcttcactgtgtggccctgagcaagacattctgtctgtctgtgcccgtccaagttggagaagaagcgtgattcaattttgtggggggctgctgcagggatgttggccaattcagcttccctccctgacccctaaactcactggcccagaccaccccatgtgctcgccaccctctgaaagccaaggctggggggttggatattttgactgcggttgaaggaaagctcacaggtgctgaccgtgtctcccccactccgcccaggcccctggtggacttgtacagccgccggtacttcctgaccgtcccgtatgaagagtgcaagtggaggagaaggtgcacttggtgtctgggggtgcggtgggctcctgagggccctgtcttgaattactgggtggaaccagcggtaacctagaaaatgccactgggggctgggcacagtgtctctgggctgtaatcccagcacttccggaggctgaggcaggtggatcacctgaggtcaggagttcgagaccagcctggccaacatggtgaaaccccgtctctactaaaaatacaaaaattagtcgggcgtagtggcgtgcacctgtaattccagctacttgggaggctgaggcaggagaatcgcttgaacctgggaggcagagctgagactgggacactgcactttagactgggtgacagagggagactctgtctcaaaaaaaaaaaaaaaaaaaaaaaaaggcggccaggcgcggtggctcacgcctgtaatcccagcactttgggaggcttgggcggatcacctgaagtcagttcgagaccagcctggccaacatggtgaagccccatctctaccaaaaaatacaaaaattagggaggccgagatgggcggatcacctgaggtcaggagtttgagaccagcctggccaacatggtgaaacctatctctactaaaaattgaaaaattagccaggcatggtggcgggctcctgtaatcccagctactcaggaggctgaggcaagagaatggcttgaacccgggaggtggaggttgcagtgagccaagatcaggctactgtactccaacctgggcaacagagcgagattccatctcaaaaaaaaaaaaaaaaaaagagaaaacgccactggacacgggccacatcccaacgccacaggcactggccacttagctggctggagctctgtgccaggtgcccagagcctgaggcctggatagcacggcccaccccaaccctgtccagggcatctcccggacccacagggtgaacatgccggaggttggagcctctagcccagggcttctgaccgagggtccccttgctcagaggttctgtccctgactatgacagctttcaggccccccaccgggggtatattcttagcatcacccttctgtgctctaagccatccttgccttctccctctgcagtacccgcaactacacagtccctgatccccccggcctcttcgatggccacgtgtggcccatgtaccagaagtataggcaggagatggaggccaacggtgtggaagtgggtaagcccctgagcatgaccaggccttgccccgggcgggcgggggggaccctgggcccagcccctctccatctttttttttttttttttcaagacagagtctcactctgtcacccaggctggagtacagtggcacgatcttggctcactgcaacctccgcctcccaggttcaagccattctcctgcctcagcctcccaagtagctgggattacaggcgtgagccaccacactcggcccctaatttgtgtattattaatagagacagggtttcaccatgttggccaggctggtctcgaactcctgaccttaggtgatctgccctccttggtctcccaacgtgctgggattacaggcgtgaaccactgcagctggccaccattctaaacgcccttcagtactccccactcaggacctttggaaacctggacattcctccgtgagcctcgcccccagtccctcttgctatttttgttgttgttgtttagacggagtcttgttctgtcgcccaggctggagtgcagtggcgcgatcttggctcacggcaatctccgcctcccgggttcaagcctttcccctgcctcagcctcctgaatagctgggattacaggcgcgcgtcaccacacccatctaatttttgtatttttagtagagatggggtttcaccctgttggccaggctggtttcgaactcctgacctcgtgatccgcctgcctcggcctcccaaagtgctaggattacaggtgtgagccaccgcgcccggccccctcttgctgttggtccaggaaactgactccagcagcccgactctgcagatctccttgctcctgacccagccgtccactcgtccccccgtgctctggcccccttcctcccggcagccctgacgcagcctttctgatttcagtctacctggacggcatgaagtcccgagaggagctcttccgtgaagtcctggaagacattcagaactcgctgctgaaccgctcccaggaatcagccccctccccggctcgcccagccaggacacagggacccggacgcggatgcggccacagaacggccaggcctgcagcgtcccagcaggacagcatgtgagcgtttccctatgggggtgtctgtacgtaggagagtggaggccccactcccagttgggcgtcccggagctcagggactgagccccaagacgcctctgtaacctcgctgcagcttcagtagtaaactgggtcctgtttttttaactgttggtgtctaccgtgttctgtctaagatccgtcaggccaggtgcagtggctcacgcctgtaatcccagcagtttgggaggccgaggagggcggattgcctgaggtcaggagttcaagaccagccaggccaggatggcaaaaccctgtctctactaaaaatacaaaaattagccaggcatggtggtgcatgcctgtaatcccagctacttgggaggccgaggcaggagaatcgcttgaacccgggaggcagaggttgcagggagccgagatcgcactactgcactccagcctgggtgacagagcaagatccgtctcaaaaaaaaaaaaaattaaaaattagctgggcatggtggtatacctgtgtagcctcagctacacaggaggctgagacaggaggattgcttgagcccaagaggttgaggctgcagtgagctatgatcaggccactgcactccagcctgggtgacaatgcgataacctgtctcaaaaaaattttttttctcaatgcctataaataaagttttattggcacccggcccctgccatttgtacgtgtcagccctgtggctgctttagtactacaatagcatgttgagtcaccctgacagagaaggtctgtctgcaaagccaaaaatatttactatttgcccctctgtgcaaaatgtgtgctgaacggtgtggtgtatgccaggtcgagtccagggccacagggagggtctgaggtctccgtgctggaggggaagcaggagtggatatggaatgggaggatgacgtggaagaggtggcttgccaaggcttctccttccccataagcacagagtgtggtaaggatgatctgccggtcactgtgcccaaaatagtccaggacaggacagagacatgagggaggtggttccaggacagcagaagccctgcctggcagcccagataccttgggcattattgttcttttaaaaaaaaaagaaaggttcatgcctgtaatcccagcactttgggaggttgaggggggaggatcacttaagccccggagttccagtccagcctgggcaagatagtgagacccccatctctacaaaaaatgataaaatattagcaaggcgtggtagcccatgcctgtaatcccagcactttgggaggccaaggaggtgaattgcttgagcccaggagtttgaaaccagcctgggcaacagagtgagaccccgtttctgtttttatttttctgtatttatttttacttagttatttatttttgagatggagtctcggtctgtcgcccaggctggagtgcagtggcgtgatctcggctcacggcaatctccacctcccaggttcaagcaattctcctgcctcagcctcccaagtagctgggatcacaggcatgcaccaccacgcccagctaatttttgtatgtttagtaaagacggggtttcgccatgttggccaggctggtctcgaactcctgacttcaggtgatccacccgcctaggccccccaaaatgctgggattacagacgtgaaacaccatgcccggctgtgagaccccgtttctacaaaaaattagccaggcatgatgacacatgtctgtagtctcagctactcgggaggctgaggtgggaggatcccttgagcccagaaagttgaggctgcaatgagttatgattgcatgactacactccaggctgggcgacagagcaagaccctatctcaaaaaaaaaaaaaaaaaaaaacaaaacaagaaggggaacagtagccacagggtaaccaaccaaaaaacggaagatgataagggttggccaggatgtggagagagcaaaacccttatgctctgaggtgggaaatggaacacagtgagcctgacgagaaacagtctggccgtttctcagaattaaacatggaattaccatagggcctagcaatcctgctcctgggcaaggccccaaggaattcacagcagggactcaaagagatccttgcacagccatgttcatgggggcacagcccacaacagccaaaaggtagaggcaacccaagtgtccacagacagatgaatgaatgaacacaatgtactccatccgtacatgaatattactgagccatgaaaaggaagggaatctggacacagggcacaacaggatgatccttgaagatgtcacgctccgtgaaataagccaaggccgggcatggtggctcacccttgtaatcccaacactttgggaagcggagaggggtggatcacctgtggtcaggagttcaagaccagcctggtcaacatggcaaaaccccgtctctactaaaaatacaaaaattagctgggcatggcggtggcgtgcctgtagtcccagctacttgagaggctgaggcaggagaatcacttgaacccaggaagtaaaggttgcagtgagccaagattgcgccattgcactccagcctgggcaacagaacaagactccatctcaaaaaaaaaaaaaaaaaaagggaaggaagggagggagggagggagggaggaagctgggcgtagtcgctcacacctgtgaatcccagcactttgggaggctgagactggaggagccaaggagtttgagatcagcctggacaatatagcaagaccctgtctctacttttaaaaaaaatactggggggctagagcagtggctcacgcctataatcccagcactttgagaagccaaggcaggaggatcgcttgagcccaggagtctgagaccagactaggcaacatagtgagaccctgtttctttttttaatttaaaatgttattcttggccgggcacagtggctcatgcctgtaatctcagcactttgggagaccaaggcacccagatcacttgaggttaggagttcgagaccaacctggccaacatggtgaaaccccgtctctgctaaaaatacaaaaattagctgggtgtggtggtgcacacctgtaatcccagctatttgggaggctgagacaggagaatcacttgaacccaggaggcggagattgcagtgagccaagattgcaccactgctctccagctggggtgacagagggagattccatctcaaaaaaataaatttaaatttaaaaagtaaaataaaatatttttaattaaaacaacttttttggccaggcgcggtggctcactcctgtaatcccaggactttgggtggctgaggcaggcagatcatgaggtcaggagtttgagaccagcctggccaacatggtgaaaccccatctctactaaaaatacaaaaattagccgggcatggtggcacacgcctgtaatcctagctacttcggaggctgaagcaggagactagcttgagccagggaggcagaggttgcagtgagctgagatcacgccactgcactccatcctgggcgacagagcaagactctgtcttggggaaaaaaataataatgattaagatggcaaattttgctttgtgtgttttgctaaaagttaaaaaaataggaacaggagcactagggtagctagctcatcccagttggcccagaacgttcctggtgttaccactcaaagtcctgtgttcccaggagaaacaggaggatgagtcacccttatgggagccaatcagcttgagaagtcagattactccatgacccattcttatagggctcagagagggaaagaaacttgcccaaggtcacccagcagagctgatatttgaactcagctctgttgaatgccaaccccctgaccttctccagccccatgtggccttccatcttcacactcgcctgctgggaagaccccctctcccctcccagagccatctaaggggcccagagaatcccaccccaacattgcccgagtacagctggattctgggtgcagtgatggtgtcggttaacctctgcctgtctcgcggctcctgccctccacaaacagaaccagtgactcattctccccaaatgcaaagcagatgcacctgtaatttgtccccctaggagtacccgtccatcagcgacagggacagggcaccccgagaccaggcagccccgggtgcaggtgggcagctccaggacccagcctgctcggcccaaacccaggcagcctctgccacttcctggcccactgtccccaggcaggtaaaacgccgtctctgtgcctcagttccctccctcgtgtgctcagcgtagcaccaggcgcttggagttatcacagctgctgggttgatggctggtgtcgctatgcaccacagtgacaaaccgaggcaggccccgacccacaggccagcccgatgggcacagtgagcgggatccacctgccaggtgtctagcagggcttggaattctccccagcaccccgagagagatgcgtgcaactgactcctttttgcagatggggaaactgaggctcgggaagtggatttgcttacccaagaccacacatgaaaggtggaatcagggccaggtgaggtggctcacgcctgtaatcccagcactctgtggggccaaggtgggtggatcacctgaggccaggagatcgagaccagcctggccaacatggtgaaaccccgtctctactaaaaacacaaaaattagccaggtatggtggtgcatgcctgtaatcccagctactcgggaggctgaggcaggagaatcgcttgaacctgggaggcggaggttgcagtgagccgagatctctccattgcactccagcctgggcaccatgaccgaaactccatctcaaaaaaaaaaaaaaaaagaagaaaaaggaaaaaagggggaataaggatacgagtccaggtggccgagcctgggaacctgagccaggtccactgtcccatgcctgggcccagtgtcagggtaccatcacctcgggaatcctcgttcccccagaggagacccctcctgctcctgtgtgggacccccctccatcacctccaacttcctggaatcccctcagggtcccgccagtcccccagggctttctggtcccctcagcggaggccctagtccccagcaaccacccccttggctggatgcttctgaagtccctcattctcctcctgcactcacaatgggggccacagacacccccacacacaagcttgtgttctttctctctcttttcttccctccttccttcctctcttttctctctttctctctctctttctctctttctctctttctttctttctttcttgacagagtcttgctctgttgcccaggctggagtacagttgcgcaatcccggctccctgcctgcaaccgccgcctcctgggttcaagtgattctcctgcctcagcctcccgagtagctgggatcacaggcgtgcaccaccacgcccggctaatttttgtattttttagtagagatgggggtttcaccatgttggccaggctggtctcaaacacttgacctcaggtgatcctcccgcctcggcctcccacagtgctgggattacaggcgtgagccactgcgcccggcctgtgtttactttacaagtcccacttattttattgatttttaactaaattcctctgaagaggaacctttctgacacaacatgaggaaacctggattttctgatacatgttaaaccacagagcggctcgggtggctcatgcatggaatcccagcactttgggaggtcgaagccggaggatcacttgagcccagaagttcaagaccagcctgggcaacatagcaagaccctgtctctacaaaaaatattaaaaattagctgggctttggggtgcatgcctatggtcccagctactggggaagctgaggtgtgaggacttttttttttttttttttttttttgagacggagtctcgctctgtcgcccaggctggagtgcagcggcacaatctcgggtcactgcaagctccgcctcccgggttcacgctattctcctgcctcagcctcccgagtagctgggactacaggcggccgccacaacgcccggctaattttttgtatttttagtatagacggggtttcaccctgttagccaggatggtctcgatctcctgacctcgtgatctgcccgccttggcctcccaaagtgctgggattacaggcgtgcaccaccgtgcccagctggtgtgaggatttcttgagcccaggacgtggaagctgcagtgagctatgatcacaccactgcactcccacctggacaacagagcaagaccctgtctcaaaaacaatgcaaaaagccacagaattcatatcatctaaaatcatccttgccttcaccttcctgaaatgctcccggccaagagcaatctcaggccaatagttctcacctgggggtgattctgctcccgccaaccagggaacactggacaatgtctggagacatttgtggtcctgacgccttgggaaggggtgagcggaggccagggatgctgctcgacccctgcagtgcccaggacagccccaccccagagaacagtccaaccccaaatatacacagtgtcccagggaagaaacttcttctaagggcagagaatgggctccaatcctaccctgggctgggcatggtggctcacacctgtcatcccagcactttgggaggctgaggcgggcagatcacttgcggtcaggagttcgagaccagtctggccaacatggtgaaaccccatctctactaaaaatacaaaaattagccgggcatgatggtgcacacctgtaatcccagccactcaggaggctgaggcaggagaattgcttgaacctgggaggcagaggttgcggtgagccgagatcacaccactgcactccagcctgggcgacagagccagaccctgtctcaaaaacaaacaaacaaaaaatcctgccccgctcccttgaggtacctatcgtgggcccaggaagggactgagagtccagggcaggcaccaaccatcacacagaggcccccatgttgtcgcgtggctgacacttctctgggccaagtcattcccggagcttgaggaacttggctgagggtagcctggctctactgaaagtcccctgcctgggggcctccctccttgacccttgcaggaccccaggtgacaggcagcccatggagtctgtggagggcagaggacctcgttggaagctggccttccgagctcccgtgcgagggcgggattctcgtgcccacagtggggtccttggtttgcagcttctgaagcctttccctgtgaggggttggggaggggtgtctcagggttcccggggcctgggacagacaggcaggaccccgctgtgcccctggctcagtggcttctccagctgggaaggcaatctttggggggtttttttgaggcagggtctcactctgtcacccaggctggagtgcagaggcaccctcatcgctcactgcagcctcaacctcttgagctcaagcaatcctcctgcttcagcctcccaagtagctgggactacagggcgtgccaccgtgcccagctaatttttttattttatgtagagatgggatctgtttcccaggccagtctcgaactcctgggctcaaggaagcctcccaactcagccttccaaagtgctgcgattataggcgtgaaccacctgggtcatcaggaagccagtctgcagccccctccctgcctgggaggcactggagggtgtgtgcgcagacagatggacagtcccttccatggagaacctgaactccctgccctgccctgcccgctcccctgggaccacccagccctgggactctgccctcaggcccttccccagaagtcctgctggccatgggaagagagaggctgagacccacccggatggaagcagagaggccctgggaggtgggggggatgaggttttagtgccggcctccccccaactctatttcaggcacccccaccccacccccaaccatctgccactcacatcaagtagtagtcagccggccccttaatcagcagttactccgctggcgccgccccccgccccccaccccagggccctaccagggccaaagctgtcacctccaaggccaccgagcttgggtgccccagactccctgctgccagggccttaagggggtgtccttggggccagctgtgggcccagctagggcctgggggagaagcaggctgaagaggccagacaggatccaccctgcacattctgggggagctgcgggctcccgagaaatggccttgtctcctctctgcccccgttaagcttctgcagcattcaacgaggtcgagaaaccactgagcttccgggaggacgagggcccagccccctccaaggtaggggagggggtgacaaggtgggggtccagcggctctccaagcagggaacccgtgaggtgcagtcaatccaaacagggctcattgaggacatggcctgtaagttctcccctaaagggaccttcaaactatgaaaccccagagaggggcgggagaccccaggacagccaggggttggggtggggagggggccggagggagggagcccccacctccgtcctcgccattcgcctccccccactgagggagccacagctgtggccacatcatcgcaagacacacatgcattgttggggtcacccggcctgcggcgggatccccggctctgtccccttagataaggagaagcagtgagcaggcccagcccccaaacagctcagccgctgcctcctcctcctcttcctcctcctccccacagccatcttccctgctccttaggcagggctgggcctgggctgtcctggaggccaccgaaccgcctgggacaagtaggtaccaccccggatctgtgcttcggacgtcctttgaggggggatctcatttcaccactgttctgtgtctgacttccggccgccgagcgggggcccgtgttctgcacgaggctgaccagggggacggggggagagatggttttggtacttacttttctttttgtctcacaacaggggggttaaggttctcgggggctgaaggagccgcttggggctggcaggcctggctttatagcggctgtcaccctggacctgggcaaaggcaccgtggttattaatagtgaccgcagtttcatgcccgtgtatggtcaaggccacggcagctgcgggctctgctggactcaggcctcctcccaacacctgctccaggccctgacctggaggcgccaggcagcgctcgccccacccaacgcgacttggcaatgactaagtctgagaccctagaatcaaacaagactcatagttgggggccctccagagggtgccaggccccgctgcagcccttccttccgccctcaccaccatcttgggaggcagatggaatcgctgtcccctggggagggggaaatggcagagaggcagcaccgtttaccaggagcagagccaggatgtgcttcaacccaggacacattttgcagacagtgtgtaactaaatccaagctgcggcgcaaagcctcaaatgcgtgttctgtgtcctgtgctgcctttgctcagcctggggaaaccgggagggccccgatggcctcctctgctcctgcaggtgcgtcccctaggcaaagagccctccatcctcagagggggctgggcagggtcctgcttctccttgagtcacttctgttccctgctagccctggaactcttctgctttcctcttctccccttctcctcttcttttctttttgagagagtctcactctgttgcccaggctggagtgcagcagcacaaccgtggctcactgcaacctccgcctcccgggttcagaatgattctcctacctcagcctcctgagtagctgggacttcaggtgcccaccaccacgcctggctaattttttgtatttttagtagagacgggatttcaccctgttagccaggtcggtctcaatctcctgaccttgtgatccacccgcctcggcctcccaatgttcttggattgcaggcgtgagccaccgcacccggcctctttttttttagacggagtctcgctctgtcgcccaggctagagtgcagtggtgcaacctcggctcactacaacctccgcctcctgggttcaagtgattctcctgcctcagcctctggagtagctgggattataggcgcccgccaccacacctggctaattttttgtatttttattagagacaagaatttcaccatgtggttcaggctggtctcgaacttctgacctcaggtgatccacccgcctcggcctcccaaagtgccggttctgttcttttttttttttttttttttgagacagagttttgctcttgttgcccaggctatagcgcagtggtgcgatcgcagcttaccacaacctccacttcccgggttcaagcaattctcctgcctcagcctcccgaatagctggggttacaggcatgcaccaccacgcccagctaaattttttatttttactagagacaaggtttctccatgttggtcaggctggtctcaaactcccgacctcaggtgatctgcccacctcggcctcccaaagtgttgggattataggcgtgaggcactgtggccggcctgcttttttcttttcttttcttccacccctcccttgccctctcctcccctctcttccccttgccttctctcttctttttctcttctcttctctttttttcttttttcttttcttttcttttctgacagggtctcactctgtcacccaggctgcagtgcagtgatataatcacagctcactgcagccttgaccgcctgggctcaagtgatcctcccgcctcagcttcctgagtagctgggattgcaggcatgagccaccacacccagctaatgttctaattttttgtagacacagggtctccccaggttgcccagtctggcctgcaactctcgggcccaagcaatcctcccgcctcagcctcccacagtgctgagatgacaggcgtgagccaccgcacccggcctgaaattttctcaacaggccgatcatctcttctctggggaagcggaggccccctcaccctctcattactgcaaagcctgcctcccacggtccctggctgtgtgctgtgttcctgagcgcagcccagagttgggggggaccctgcgtggtgtggggtgttccctcccccgcgacgtctatcttatctgtccagcacctgaggtcctgtgttcaaccagccccatgacctttctctgatgccccagggttgagtcacagccaagctatggcctgaacccagcttgccttgtcctggaggtcacgcctggcccagcagctgcaggggggcggggggggggacccgcacgcgacaaccctgcccaagagcagcagcacggacgcccaggacgcaggcagctgcagtcatcgctggatgcacagggatgggcaccaggcaagaaacacaccaagccctcactggctctccctggcgctgagccctgtcccagggatgtctttgaaaacttgctcccactggctggacgcagtggctcacgcctgtaatcccagcactttaggaggctgaggcgggcagatcacctgaggtcaggagttcgagaccagcctggccaacatggtgaaaccccgtctctactaaaaatacaaaaattagccgggcgtcatggcgggcgcctgtaatcccagcgctactcaggaggctgaggcaggagactagttctgtctcaaaaaaaaaaaaagaaaactcgctcccaccagacagaccctgagccccccccactcctctctgcctcactccatcccagccactccttggctactggcatgaccaagaggttgtctgcccatacatggagcctcccggcagggcctccagctgccgcccctcctgaaagccgaattcgacaggccagattctgcaggggcggtgagaccacggctcgccccagggcgggccatgggtgttttcttgacctagaaatcagaccagtgaccgtcccagcctgtgggagctgagggctggaaactgccagggacctgccagtgccaggtatagtcacagggcaggtcatgatatgcccgtgtgagccagacaccacgctactcaagaggctctcagagctccagaggtcaggaggccagaaggaaggtgccagcagagccaggctccctcctacccctccagattccggtggtggccagtggtccttggctccttggccgcaccgctccaatctctgcctccatctttttttttttttttttttttgagacagaggctcgctttgtcacccaggctggagtgcagtggcacgatctcaactcactgcaacctccaacctcccgggttcaagtgattctcctgcctcagcctcccaagtagcctgccatcacacccggctaatttttgtatttttagtagggacgaggtttcgccatattggccaggctggtctcgaactcctgaccttgtgatccacccagcttggcctcccaaaatgctgggattacaggtgtgagccaccatgcccggcctctacctccatcttcacatggcctttctcggtgggtaggggggacagggattcactttgttgtccaggctggagggcagtggcacgatcatagctcacagcagcctcaacctcccaggctcaagcgatcctcccacctcagcttcccaaataactgggactacagacgtgtgccaccacgcccagctaatttttgtattttttgtagaaacgggggtctcactattacccaggctggtcttgaactcccgggctcaagcgatctttctgtctcagtctcccaaagtgctgggattacagctgtgagtcaacataccgcgcccagcccccacgtagtcttttctttcttttttgagacagagtctcactgtcgcccaggctggagtgcagtggcatgatctcggatcactgcaacctccccctcccaggttcaagcaattctcctgcctcggcctcccgagtagctgggattacaagcacctgccaccacgcccagctaatttttgtatttttagtagtgacggggtttcactatattggcgaggctggtctcgaactcctgacctcaggtgatccgcctacttcggcctcccaaagtgctgcgattatagccgtgagccaccgtacatacccagcccccatgcagtcataaggactagggcccaccctacttcagcatgatgtcattctaactacctccacatccgcatcctaacaaattacatctaccctatttccaaataagggcctatttaggaattcagtatttttgtggaggacaccaattgagctctcaccggacaccctgagtgggggacagggtgccccatctgaccctctgccagtggaactcagcctcacactgctgtggagtgggaatcccgtagaattgtgagcccctgaagctgctgcacgccactgccacccaacgtggattctggggtgtccttgacaagactgagcactccacgggtaccagccccatctcaggtgcccagaggaaggccagagacggggctggggactcggggctcggggtcaccccactgaggaaggctgggccagagtgtggttgcatgctcccagcaatgggagcccccgggggtcctggtctcctggtgtagctggtccgcccctccccagcagggttcatgttctgctggttccaggaaaagggctgggagtatgagtttgggccctgctgtgcttccgtggacctcaatttccttgactgaccagaggggctgacctgagaggcctcctggtcttctgggggctgagggggtgatggtcctggcctccggtggggtcccagaggcctccgagaggccaaggcttgatgctttgtgtactaggggatgagaagccctagggggtctggtagggagtgctgaaggctgtgacgattaaccagattggatgtactagatgtattattattattattaattattgttatttgtagagataaggtctcaccatgtttgccaggctggtctcgaactcctgggctcaagtgatcctctgcctccacctcccaaagcactgggattacaggcatgagccaccatgcccagcttgaaatatgtttttattatggttaaagtacacatagcaggccaggtgcggtggctcacgcctgtaatcccaacactttcggtggccgagacgggtggatcacctgaggtcaggagttcgagaccagcctggccaacgtggcgaaaccccgtctctactaaaaatacaaaaaattagctgggtgtggtggcaggtgcctgtaattccagctactcgggaggctgagggaggagaatcgcttgaacctgggaggcagaggttgtagtgagtttagatcgcgccactacactccagcctgggtgacagaggcagactccatctcaaaaaataaataaataaaatacacataacatacaatgcaccactttcaccctttttcctttttttttttttttttttgagacggagtctcgctctgtcgcccaggctggagtacagtggtgcgatctcggctcactgcaagttccacctcccaggttcacgccattctcctgcctcagcctcccgagtagctgggactacaggtgccaccacacccagctaattttttttttcgtatttttagtagggatggggtttcaccgtgttagccaggatggtctcgatctcctgacctcgtgatccgcccacctcagcctcccaaagtgctgagattacaggcgtgagccaccgtgcccggtgtaccgtgcatttatgagacaaggtgttgctctgtcaccaaggctggagtgcagtggcgggatcacagctcactgcagcctccacctccagagctcaagtgatcctcccgtctcagcctcctgagtagctgggaccacaggcaaccccactacacctggctcacatacaatttttgtgtggatgtaccttttcctgcctctgtgaatgtataaaaccactgaattgcacactttaaaagaaagattttagggtgtgtgaatcatagctcaatgaaagaaaaaaaaaagttaaaaaaaaaaatggccagatgcggtgactcacgcctgtaatcccagcactttgggagcacaagaagggcagatcaattgaggtcagaagttcgagaccagcctagccaacatggtgaaaccccatctctgttaaaaatacaaaaattacggccaggcatggtggctcacgcctgtaatcccagcactttgggaggctgaggcgggcggatcacctgaggtcgggagttcatgactagcctgaccaacatggtgaaaccctgcctctactaaaaatacaaaattagcccggtgtggtggtacatgcctgtaaacccagctactcgcgaggttggggcagaagaatcgcttgaacatgggagacggaggttgcggtgagccaagaccacaccactgcactccagcctgggcaacaagagcaaaactccacctcaaaaaaaaaaaaaaaaaaattagccacgtgtggtggtgtatgcctgtaatcccagacacctgggaggctgagacaggagacccgcttgagtccaggagaccgaggttacagtgagccaagatcgcaccactgcactccagcctgggcaacagggccagactcgctctcaaaaaaaaaaaaaaaaaaaaaagcaaaaaaacttcctccagggaggatggacagggtcggggcccctctctgaaaccacctgtgagccctagcagctgagctgagccgctccccctccagggccacctgcatgtggctccagacggggcaggggctcccacgtgggacacagcagcatcccgtaaggcgcaaagggacaggaaacgcttctgatccacctcagctgcccagagcttccacctcattgcaatcaaaacactcggggcagctgagaccaagatccggcagctcccaggacaccgtgaaggtctgcgaggacccccggtttgtcccctccttcctgagcacagcggcaggcatggaacacagagagaaacatgaacgccgcggagggcatatccccagtggccaagggctggctgtcccctgccaaggcctgaggcacacaacacccgcgtatctggaagccagtattttatttctcttggctgcagagggccgctcttgcctaggcgtccacaggcgcgacgatggggctcgcggaggagtccgcagcagggcaccccacacccgggggaccggcctcggcgagaagggcacacagtggaagaccccaccaagcccggcgccacccagcagcgtggggactgcctgtccgccgtccatcccaccctccccgtcccacgacctcctcctgggctaatggcagcaacaggcagcaccccgccgaattgtccgtgcaactacccgcaaaccctcctccgggcctgaaccagggctgcattcgggccgcctctgcgcctcggtgggtcccaaccctcacggtgccacaggccacgctgcctggagggtcccagggtcaccgacgatgcaggggtgaaggtgaaggccagcgtggaggctgtgtagagaagcagccccgtcccacacccacccctgcctgcgaacttacgggcctggctccagctcctcccactccgcctccagcctggtggcgctgggcaaggacaggcacccgggcgatgggaggcgcagcgtccacaggaagcgcccccaccgcaggccgagctccggctgtcctggggcctggcccaccccactgcgcctagcgcagcccgcactccacgccctgcagcttctcctgctccagggcgcgcacgaggtcctgcacgaagcgcatctcggaggctacttgcttggccagcgcctcgtagcggttctccaggcggctgaagcggcgcttgaggccgctggtccccagcagcgcgcccttggcctcctcctgcgcctgccgcttgagcgcctcggtcttgagcagctcctgccgtagcctccgcaggtcctggcccaggctgtcgctctcctcgcggtaccaggcctccttctcctcgtagatggcggccagcgcctccacgtcctcgtggcagagccgccggctgcgctgcagctcgcgcaggccctcctcggcggccgccgcctcctccagcaccttggagaagcgctcgaagtcggcgtagctgttgttgggcggcaagctggagtgcgacttgatggtgtactccttcagacgcgtggtcttcaggcgccgccgctcgggcttgcggccgctgtcctcaccacgcacgttccgccgccggatcgcctaggaaggagggaagcctgagcggggtccccgcgatgccacccagccccgccagcccccacctgccagtgtgaactgaggttcaggggctcatccggcagcagagtcaacgcctcgtgacggagactgcccagcccgacgcaaagccgagagtgctctctcgagaaaaacgctgcggccctggccccaggagtcagccccgttggacacacaccagccaaggatgccaccaggtctgtcgggtgctggacatcccacgcccaggacccaacccccgccacacaggctcactcctctggggaccctccccagccactgggggttgtcacatccacaagccttaaatgctgaaggccccccgggaccccagcgagaaggccaaggcgggaagcccagggagctcccccacctccccacttaccttaatccaggaatgttccaggctctgggcaatggtcattctccgcctggaagacccccgctctggttaggtacacctgcaccatctgtcccgtcctcccgtgaacaactgactcccgggacccccaaaagccctaaagtcgccccccagcctctgctcagccaaccacagaagctgaacaagggtactgcagggagcgtggggttttctggggggtggtggagagagctgagacctcaggctggagtcgcaaacccaggcgcccgagagagggactgggcggccatggaggcccggggaggcctacgagtgagggctcagcactgccagaattctaagtgtttacaggaaaacaagtgacctggaattttacatggatccttactttacacaccggcaactaattaaaagtttgctaaaaacacagcaagcagccagacacggtgtctcacgcccgcaatcccagcactttgggagaccaaggcaggcaaatcacaaaccaaggaggtcaggagttcaagacaagcctgggcaacatggtgaagccctgtctctactaaaaatacaaaaattagccaggcgtggtggcgggcgtctataatcccagctacttgggaggctaacgcaggagaatagcctgaacccgggaggcagaggctgcagtgagccgagatcacgccactgcactgcactccagcctgggagacagagcaagactccgtctcaaaaaaaaagactccgtctcaaaaaaaaaaaaaaaaaaaaaccatggcaatggccagcttgggccaccagtttatcagtttactctctccagcccaaggggtaagcaatgtctgatccccagccgcagggaggtggcgctgggaggagagtcctctggagcctccgtgggtggagtgggcctgtgtcccatgtcccaccccgtgccccctgccggcccctcgtacttgggatctttgacgagcagccggcgaatgaagtccttggccagctcgctggtgttgctgaagtactcctcgtcgaagtcgtagttcacggctgagatgttggtgagcgtctcctgcttggtctcgcccaggaacggggatgcaccgctcaggctgcgagacaggcgtgggggctcagtggggtcctgggctcccaccacggccgcgccgcctctccggctgcccacgacaggcggagcacagaagacaggctgacggcaggtgcctgggccactcacactcctgagcccttagaaccttcctgcaacgatcccagacaccacccaagaggcattcaaaatccacccccccaccccgccactgacagcagcagaaatgaacaggcagaagtctccttggagactcgaagtatctgtgcagacgcagagcccgaaagcccccagtgctcagtaacgccgaggggagggtaactgcagtggggagcccgagccaacaccttagccaaaggatcaaggtcaacagcccggcagtgagaggccccaacagcgtctgcctcccagcctgacgctgggagggtgacacagcatcatccctggggttttgagcagagacactgaagccccgtctgatcgtctgatcgtgacagcgcacgagactaaacgtggactcagacgccttctgcaaaacacctgacccgtgagcacaagtcagggtcaaggtcatgaaagccagacagaggaacagcctcagactggaggcggcgaaggagctgaatggctaaatgccgtgtggggacctcagagaggacaggagtggaaaacgggggtgtctaaccacctctggcactttaaattttttaaattttttagagacggagtctcgctctgtcacccaggctggagtgcagtagcgcgatctcggctcactgcaaactccatctcctgggttcatgccattctcctgcctcagcctcctgagtagctgggactacaggcacccgctgccacacccagctaatttttgtatttttagtagagacatggtttcatcgtgttagccaggatggtctcaatgccctgacctcgtgatctgccctcctcagcctcccaaagtgctgagattacaggcgtgagccatcgcacccggcccatctagcacttttgtgattagcgtagcaccaaggctaacgtcttggtgttcataacgttcgtgttcatgaaaaatgtaaactgaaggaggaggaagctgcagggggcgtctgtgctgtttctgttgctcctttgtaagtctgaattatctgaacatttaaaaagaatacaaacggtctagcccatctcctgaagcctttgggtccgctcacgcactacagcgggctgggcccacgccattgtttatttccttgcttactgaatgagctatgcccattcaatatggctgggcaacacagtgaaactccacctctacaaaaacttttaaaaattagccagctgggcacggtggctcacacctgtcatcccagcattctgggaggccaaggcggccggatcacttgaggtctggagttcaagaccagcctgaccgaaatggtgaaacatcgtctctactaaaaatacaaataattagccaggcatggtggcaggcacctgtaatcccagctacttgggaggctgaggcatgggaatcacttgaacccgggaggcagaggttgcagtaagcctgagctgagacggggccttggcacttcatccagcctgggcaacaagagcgaaactctgtctcaaaaaaaaaaaaaaaaaaaaaaaaattagccagctgggtgcagcggcccacgcctgtaatcccagcactttgggaagccgaggcaggcagatcacctgaggtcaggagttcaaaaccagccttgatcaacatggtgaaaccccgtctcttctaaaaatacaaaaattagctgggcatggtggtgggcgcctgtaatcccagctactcaggagactgaggcaggagaatcgcttgaacctgggaggtgggggttgcagtgagcagctgagatcgcaccactgcactccaacctggacaacaagagcaaaactccatcaaaaaaaaaaaaaagtccgagcatgggagcatggttgtgtgcacatgtagtcccaggtactcaggaggctgaggtgggaggattgcttaagtctgggaggtggaggctgcagtgagctaggacagcactccagcctgggcaagagagtaagaccccgtctcaacaaataaaaataataaacaacagcaggcccacgtgtggcccagggacaggagccaaaacccagcgtggggtcggaccccttccttgcacttcgagaggaggctgggctccctagcagccagagggacaggagcacacacgacccccaacccggagcctgctcagccgctctgtgagtgtcctgccttcagaactctccagaagcctctgtgacagcagccacagagaatcactcatccgttcacccggtatcccctgagtacccgcgatgggtcacagccaggctggggacccctggcgtccacatgagacacacggagccggggacccatgccagctgtgttgcacagccgagggggcccccgccaggtactcacaggatataggtgatgacaccgatgctcctggggacagacaagaggcaagggtcagcgcagcgtggggccgcccaccctcccaggaccgtggcgtccagcgcccctgttctagggcaacggtccccccataccccaacagcagcaaggccccgcttcatccccagctgcagcactggcctgcgctccaggaatgcagggaggcccggtgggagcaggtggtacactcaccacatgtccgcctccaggcccagcggctcatagttcacaatctctggggctgcagaacagggagatgtgggtcaggcactggggacatgctggccaaggaagaggctcaagacacaggcatggggtcaaggttctcacatgtcgcagcccttgggggcatgaatgcggcagagctggccctcagggcctgacgggtaggacagcggggctgcaccaaatggaggcccagacctcccgcaaagccgggcccaagaggggtggcttcagggccgaggacgcggcacccagcaccgggcatgacccaccccacgcacagcaggcagccccagaccaccctccccaggccggggctgcccactgggcagggcctcacccacaaactccggggtgccgaagatgttcttgaactcgttccccgcctcgatcttgtgcgcgatgccgaagtcgatgagcttgattcgtgggttgggcacgttcttgtccagcagcatgatgttttccggctggggtgggaggaggctcagcagggaaagcacgggcctcccccaccctcacccccacgctccccaaacctcaccctcacgctccccgcaacctcacccccacgctcccccaacctcacccccacgctccccaaacctcacccccacgctccccacacctcacccccacgcgcaggaggtgccttccaggctcttccccgccccatccccacccccacactggccaggccggccccacagggccctacagggctcaccttcaggtcaaagtgtgcgatgcgcttagagtgcaggtagtgaacgccgtccaggatctgcttgaggaactgggtggcctcgtcctccgtcagcgactccttctccgccaggaagtcaaagagctccccgccagagaccagctccaggatgaggaccacgtccgtcttgttctcgaagatgtcgtgcagggtgatgatgttggggtgccggatctcccgcaggatgttcacctcccgctcgatctcctcccggctcaccccacgccggctggatgacaggcggcgcttcttgatgaacttggctgcgtactccttgcccgtgcccttctgccggcacttccgcacgatcgcaaactggccgctggaggagggggagggagtgagtgggggtggaggaggcggagggagtaagtgggggtggctggctccccgtcacctccacttgctcctcttgggcgcggccctgcaccaggcacttgaaggacatgagctggccactgcgggggtgcagactctgcgccttctcagagagcaattccttagcgccccacaccatcagacgcggcgttcccacccctcccagggctatgcccagcaggtgtgtggaggggagtgcagagccacacgttaacaccatggcaccggcgtatttttgaaaagtgaaagaatgaacagttcaatgcatatcaagagggaactgagggggccaggcgcggtggctcacgcctgtaatcccagcactttgggagttcgaggagggcagataacttgagctgaggagttcaagagcagcctggccaacatggtgaaaccctgtctctaccaaaaatacaaaaaattagctgggtgtggtggcgggtgcctgtaatcccagctacttgggaggctgaggcaggagaatcgcttgaacctgggaggcagaggttgcagtgaactgagattgtgccactgtactccagcctgggcaacgtagcaagatcctgcctcaaaaaaataaaaagtgcaaggcaagtgccagatccgctttttttgtttttgttttgttttgtcttgagacagggtctggccctgttgctcaggctggaatgcagtggttcagtcatggctcactgcagccttgacctcctgggctcgggcaatcctcctgcctcagcctctcaagcagctgggactacaggcacataccaccacacccaattaatttttttttctttttgtaaggatgaggtctcactatgttgcccacgctggtctcgaactcctgggctcaagtgatccctcccaagtaggtgggactacaggaacacactaccacacctgatttatttattttttgtagagacagggtcttgccgtattgcccaggctgctttggaactcctggcctcaagagatcctcccactcccccaccccaagtgttggcagtacaggtggagccgctacatctggccagtatccgcattttaaagaaaccaaggctgagaaaaggaaagcaactagcccaaggtcatgcagtcagtcagtggcgggaggattcaaaccttcaaaccaggtgctgcaggctccagagcccaggtgctctaacaggaagcagacagctgctgctgggtaccgggttcctgcgtgcctacctcccggctccacgctgtctcctgctaacagacccagctgtcccagggcagcctttgccgctcactctcagtctgtgggactcagtggcccaggaaaggggtggaaggggacacgactggacctgggcaagcagaaaaccacgccttccagcccaaagagaccggtccagtccacagggctctgaacgcctgctgggaagagaggatctctctctccctctgctgggcttggatccaggctcgcggcaggggccaccacgtagaaggctacctaagaagcctgcctaagaacagaccaggccaggagaggggagccaccaggcactgcgggtggcacataagccccgtcattcactctgccagggcgcctcctccatgctggagtggacttcggccccggggacacagggcaccatatgcaccagcacccagtcacacctgcggccgctgcacacctggacaacctggttctgtaaaccacgcctttccctgttttgctattgccaaccagatttcaggttctgccactgagtcctcctacagcaacagcagaccacagccgcccacctccagacagcccccggtctcactggccacagacttgctccttagaggcaaggccactggcaggctctcagttcctctacggaatgtgaaacgtgcctcatctccccagccgggaaagaaactccccaagagctgagcccaccctcttcgcttctctgtaacttccccagcccccagcgcaggtgggggcacagcaagccctcctcagtgatggtctcaggtgtcactcccaacccacttcctaagtgcctgccacaacccagacacgacccaagcgtggcctacacaccgacaatttctactgatagagttcatgatgtttaaaaatgcgggctgggaagccgggcacagtggctcacgcctgtaatcccagcactttgggaggcaaaagcgtgcagatcacgatgtcaggagttcaagactagcctgaccaacatagtgaaagccacgtctctactaaaaatacaaaaacattagccgggcgtgctggcaggcatctataatcccagctactcgggaggctgaggcaaggagaatcgcttgaacctgggagacggaggttgcagtgagctgagattgcggcattgcactccagcccgggcgacactgcaagactccgtctcaaaaaaaaagtgtgggctggggccaggcacagtggctcacacctgtaatcccagcactttgggaggcagaggcgggcagatcatttgaggtcaggagttcaagaccagcctggccaacatggcaaaaccccgtctctactaaaaatacaaaaattagctgagcacgttggtgggcgcctgtaattccagctacttggaaggctgaagcaggagaatcacttgaacccgggaggcgaagattgcagtgagccaagatggcaccactgcactccagtctcggcaacagagccagacaccgtctcaaacaaacaaacaaaaattgctacattctgggccttcatcttgcacttcatgtatctctgagaatgttccagaccactacctgaagcagtgccgtcagaacagcagacactggccacccagagctgtcaaacccgtgaggtgtggccagtcccgagaaaaactgcgacatgaaatacacaccagacctccaaggcttcacggcaaaaacagaaggctaaatactttttttaaaattatgaatttctgtttgtttgagagatgggggtcaacttatgttgcccaggctagtcttgaagtcctgggctcaagcgatcctcccgccttggcctcccaaagcgctagaattacaggcggaagccgccgcacctggccctgcctggttctttttacaagctgcatcctattccagccctgatgcagtggtttggggaaggccatttaagaggctgctgttcccagcggggtgcggtggctcacgcctgtgatcccagcactttgggaggccgaggcaggtgaatcacctgaggtcagtagttcgagaccagcctggccaacatggtgaaatcctgtctctactaaaaatacaaaaattagccaggggtggtggcgggctcctgtaatcccagctactcgggaggctaggctggaggccgaggctgcaatgagtcgagatcgcatcactgcactccagcctgggcgacagaatgagatagtgtcaaggaaaaaaaaaaaaggctgttattctggtaaacgttctagcaactaccccagtcttaagtcattccatccatgtatgtacagttttccaatgaattaattcctagaggtgaaatcggcgagttaaaagaaatttggctgaattttgctgacttttgccaaacgacccctagcaggaggggtcaacactgaagcatgagaagggggaggagggagcatgctttctctgccactaacgaggaaattcctgaaggagggacctcaggatcccaaaagagcctgcagcactctccctagcctgacacagagctcacttatttacattcccttctggtgacatcatggggaggctccagggaggctggccagtagcaaactcaccaaataaggctggaggctctacaaaaggaggcagggcctagtggtgcctggctagtctggagggggtggggccccagggggaccctccaaggcccagacaggcaggaaatcagctgcctccctggaagaggaaacctctgctttttcccacaagcatgttaaacaattgaccgaggtttgggcccagctgggagacacgcccctccctccccccactttaaacatccaagagctgggcaaaaaaactaaagtgcctcccacaaaagaggattaacacagggagatttttttttttttaaataaatggggtttcactctgttgcccaggctacagtgcagtggcacgatcatagctcactgcagcctcctccaactcctgggctcaagccatcctcccgtctcagcttccctagtagctgggactacaggcatgagctaccacacctggttaattttttttcatttttattttttgtagggatggagtcttgctatgttgcccaggcagaagacacatcttttaataacaaaagcagctggcatctgttgctctggtgccccatgccaggcacggtcttggctgctgtaacggctcaattacttttctccccacaggaaacacacagaggattcccaagcaggaattcacagccggggctgtctgactccacggcccaaattcgttcccccaccgcatgatactgactcattccttctcagcatacaggataaagaacaggaaaggagagctgctgttcagaaaaccccacagcgcctctctcctatccctggagcccagccgtgcgggcagacagctcacctgcccagctcctcccccatctcataatggtcctccacgtcctcctgcctgaacgtggacatggcggccggtccgccttccagcagcttccactccagggaaagtgcagtcaccgcagcctggagataggacctcaggagtcccctaatggcaaccctggagaagacagggaaagacagaagtgaggaactgagacaccacccttttctcctagattaatggacagacctgtccagcaaacacaagcctcccacctctccactctgaagctccaaactcgacaaaaagaggtgctgtgtttactgggctgggtcctgtcatgtcacctcttagagccccataaccactcaaaagtttggtaacagccccactgggccaccttcaccccgcaaaactctctccagacacataattctgatttccccgacgctgcctgcgtctttttttgcctctcactcctagacttctctcaacctgctcagccaaaatcccccaccattcctgcacgttctcctcaacctcaaatcccagggctaccttactccctggccaatgtcttaacgaagttctcaagtctacttcttttgttgttggtgttgttgttttttgagaaggagtctcgctctgtcgccctggctggagtgcagtggtgcaatcatggctcactgcagcctggaactccaaggctcaagcgatcgtcccaggcctcccaaagtgctgccattccgatcaaaattcccaagttactaccttaacccctcctggtccttgccctcggcaggtctcttaagaccctcatcgatggaacacccccgcccacccccaaccatctctgactccctccaattctgaattttccaagaaccggacgacgccttccacgctcctgaaagcccactttgcctccctcccccgctgacctccactgtcctcgcaagattaacctcttcctccacgctccatgtatcaaagtcccccaaccgccgtctcccctaccccccaaaacgggccgccaaaaagggccccatctgagtctcctccaccgtcctctgccccttctcgcccgcaatctccgcacaagcccctaggcagaccccagtggctccctttgcagaacctccccccgcccccaaggccttgcccatccctaaggctccgctccagcatccctggggccgctacgcccctcgcacgcccggccgagccctttccccggcccggtcacccagatgggtccccaaacctaccagctcctcagattctctccctccctcgtcctccgcgggcccccgaagcgccgctctggccccacccagccctccagcctcggcccgagcccgctctttaccctccgcagcccggagaatacggccggcgccgccgcgctggccaccgccgccgcctccagaagccccgcgcccctgccgccgcgacgcgcctgcgccgacgtcaccgcacccgccagtgcccacccccgggaaacgaaccccgccgcctattggccggtgcgcccgccgctcgtgccgcacctcgacgtcccgcccccagctgccttttcggcacccacacccggatgcagcctcaccactggctgaacactcgccatccctgatttcattggctgcagtcgacgctggtcaagcggacggaaaaaaggccgacttccggtcccttcatcgccccgcccgcctctcctctgacccaggtgctgaagctgcgagaagtgaggctgaagccctgcatcccgcttcctgccttcctggagcaccggttgggcgaatggatggctcacctgtggccgagcgcgcctggcagctcctggagtggaccctgggactgctttagtccctatgtggcagtttcctccactgaaaactgttacccacattctaaatacttaaaatgcaaatgaggtcaatctggggttgtcatacacagggtccctcttcgtctcaaaatagagggtaacagcaagcattttattgagacatagtatgtgccaactgacaacactgggaggtatcaggtttgttttttttttaattttattttttgagacagggtctcactctgtcacccaggcaggagtgcagcggcggtatccagctcactgcaacctccacctcccgggttcaaacgattctcgtgcctcagcctcccaagtagctgggattacaggtgcccatcaccacgcccggctaatttttgtatttttagtagagacggggtttcaccatgttgcccaggctggtctcgaactcctaagctcaggtgatccggcacctcagctttccaaagtgctgagattacaggcgtgagccattgcgcccggcctaaattcattttttattattattttgagacggagtctcgctctgtcacccaggctggagtacactggcacaatctcggctcactgcaagctccacctcccaggttcacgccattctcctgcctcagcctcccgaatagctgggactacaggcgcccgtcaccacgcccagctaattttttgtatttattagtagagacagggtttcaccgtgttagccaggatggtctcgatctcctgacctcctgatccgcccgcctcggcctcccaaagtgcaggaattacaggcatgagccaccttgcccagcctttttttttttttttttttttttttgagacagtctccttctatcgtccaggctggaacgcagtggtgagatctgggctcactgcaatctctgcctcctgggttcaagcgattctcctgcctcagcctcccgagtagctgggactacaggtgcacgccaccactcccagctgatttttgtatttttagtagacgcagggtttcaccatgttggccaggatggtctcaatatctgtgatccgccggcctcggcctctcaaagtgctgcgattacagacgtgagccacaagccggcctttatattttttatttacattttcaacgtacaatgggttggccaggtgtggtggctcacgcccgtaatcccaacagcttgggcagccaaggcgggcaggtcacttgaagtaggagttcaagaccagcctgctcaacatggtgaaaccctgtctctactaaaaatacaaaagttagccaggcctggtggcacatgcctgtaatcccagctactcgggaggctagcgcaggagaattgcttgaacccaggaggtggaggttgcagcgagccgagatcatgccactatactacagcctgggtgacggagggagactccatctcaaagaaaaaaaagtggcagggcatggtggctaacgcctgtaattccagcattttgggaggccacggtgggcagatcacgaagtcaggacatcaagaccatcctggctaacacggtgaaaccctgtctctactaataaatacaaaaaattagccgggcatggtggcgggtgcctgtagtcccggctactcgggaggctgaggcaggagaatggcgtgaacccgggaggcggagcttgcagtgagccaagattgagccactgcactccagcctgggtgacagagcaaagactgtctcaaaaaaaaaaaaaaattcagcttccacataccatcttaacgtttgcactactaaaaaagaataggacccggtatggtggctcacacctgtaaccccagcactttgggaggctgaggcgggctgatctcttacggtcgagcttgagaccagcctggccaacatggtgaaaccccatctcacctaaatatacaaaaattacacagacctggtgataggcgcctgtaattccagctactcgggaggctgaagcacaagaattgcttgagcacttgaatccggaggcagaggctatagtgagccaagatcacaacactgcactccatcctgggcgatagagtgagattctcgaaacacagtaatccgttaccctgactgctggaaacagcgtcagttacagccccaattcaaatgcgacagccaaaccaaacctcaggcatacctacatgtgggcaaaacctcagctgaggcttggccttgacaatgcagggccagagctgcccccgcctttgccgagaaccccacagccctacttcacagtccccacctgccttcctgaggacagagtaaaaggcggaaaatgatcatgttaaccttatcagcactgacaagattaggcctcctcacatcttaggcactatttagaaaaacaaatagttttctaagctattggcgctcacacctgaaatcccagcactttgggaggctgaggcagaaggatcgcttgagcccgggaaggagaccagcctgagcaacatagtgagaccccattactacaaaaaaagtaaaaattaggtcagcacagtggctcacgcctataattcccagcactttgggaggccgaggcgggtggatcacgaggtcaggagatcgagactatcctggctaacacggtgaaaccctgtctctactaataaatacaaaaaattagccgggcatggtggcgggcgcctgtagtcccggctactcgggaggctgaggcaggagaatggcgtgaacccgggaggcggagcttgcagtgagccaagattgagccactgcactccagcctgggtgacagagcaaagactgtctcaaaaaaaaaaaaaaattcagcttccacataccatcttaacgtttgcactactaaaaaagaataggacccggtatggtggctcacacctgtaaccccagcactttgggaggctgaggcgggctgatctcttacggtcgagcttgagaccagcctggccaacatggtgaaaccccatctcacctaaatatacaaaaattacacagacctggtgataggcgcctgtaattccagctactcgggaggctgaagcacaagaattgcttgagcacttgaatccggaggcagaggctatagtgagccaagatcacaacactgcactccatcctgggcgatagagtgagattctcgaaacacagtaatccgttaccctgactgctggaaacagcgtcagttacagccccaattcaaatgcgacagccaaaccaaacctcaggcatacctacatgtgggcaaaacctcagctgaggcttggccttgacaatgcagggccagagctgcccccgcctttgccgagaaccccacagccctacttcacagtccccacctgccttcctgaggacagagtaaaaggcggaaaatgatcatgttaaccttatcagcactgacaagattaggcctcctcacatcttaggcactatttagaaaaacaaatagttttctaagctattggcgctcacacctgaaatcccagcactttgggaggctgaggcagaaggatcgcttgagcccgggaaggagaccagcctgagcaacatagtgagaccccattactacaaaaaaagtaaaaattaggtcagcacagtggctcacgcctataattcccagcactttgggaggccgaggcgggcagatcacttgaggtcaggagttcgagaccaaccaggccaagcaaaattctgtctcaaaataaataaaaattagctgggcatggtggcacatgcctggagtcccagctacctggcaggctgaggcaggagagtccaggaggtggaggatgcagtgagctgactgcaccactatactcatctgggagacagcaagactctgcctctaaaaaagtgtttacaaggccgggcacagtggtacaatcccaacgctttgggaggccaaggcgggtggatcacaaggtcgagtgatcaagatcatccaggccaacatggtgaaacctcatctctactaaaaatataaaaattggctgggcgtggtagcacacgcatgtaatcccagctacccaggagcccgaggcagaattgcttgaacccgggaggtggaggttgcagtgagcagagatggtgccattccactccagcctagcaaacggtgagactccatctcaaaaaaaaaaaaaaaaaaaatgggtttctaataaactagtcaggactggggtgaccacagaaaatcctgatggcagatagaacttgtgagctcgtcagcaattcggaaagttgctgaaacctgcgaagttcaatccagagcccctcgctccacagggccatccaaatgcgttcaaagtgacatctcgtaattccttgccgcactgatcctacttcaaatgctcagcagacccgcgcagctggcagctgcttctctgaatgacacaggggtagggcattcccaccattccagaacgttccacctaacactgaggcagccccaggctgcacctaactagggcccgggtccccttctaggctccagggagcccagtactgggcagccccgctcccctgcgaagacaccgtgaaaaatgcagaacagagtcaccaccttatcaaatttattattccaatggcactagtacagctggaggtgctcatggtgacaccgcacaggacttcctgcctgctagaaatcatctacccgcgtgttcctttcccctttctggggcaaaagccactgcgggccatgtacccaaataaacctcttaatgcgtttgttaaaattagtttggacatctgagtttccctctgaagaaatggaaaaagtgttgggtgtcccatcccgcctccccctccccgaccggcccattaagtccctactaagagggcgtgtctgctgcctccggactctggaaataaatattgaaagaaacggcatcaagtgttatggttgagtgatggcacgcagcgggccccagaaacctctcaggggagcgtcgctgtgtcgggacagtctccaggtgtcgtctgagaattcgaggacgtggtgctgtgggtgctgcgagtccccggggcggcaggcgctgcaggaagggccgcctacaatttgtccaggaagttgtccagggcagggatgccttctttcaggcccttgcgcttgcgggtctccgccaccacctggctggggcggctgctgttgtcgaaggggtctccgggcaggatctgccagtggtcaaacacacactgggggaacgcctggccgcccgtgttggacctcaggtcagcggtgaagcctgcagagggaagcgagaggctcactgggccatcgagaaggtggcagggcagaaggaaagtcctgtcaggagctcaggctagttcctcagcctgagtcaccctgcagaccagacactcggcctggtgcccagcacttcacgaagggcctagcaggccactcatgggcctcatgccgctgctcgtttgggacaaccctgtgctacagctcggctgctctaccggcccagggcgtaggccttcagagctccaggcccagagcccttctcacactggggataggagagcccctcccctgggaattcagtgatttagggggtccacaagctgtcagaaactggaccacctgctccatccatcacctgctcccatcaggacgcctcctttaacaccttgctaagcttaactgggcttctgtcccccaaaccagcctgccaggctctgcaggccacaccgggcaggcactcaccaaaggactcgttgacgggcagataggccttgaccacaaacatgggggtgccggccacctgggactcctcgaacacgtggccccgcttcctgttcaaaaccccgtagatgccaccgaccacctgctctggacactgccagaagggaaagaaaacctgtcagtggccgctgggcaggacggtggcagggtcagcggtgggcgggtagacctcacctggatctccacaaggtagatgggctccatgaggcgtggctgggcggtcagcacactggcatagaggcagcgccgtgctgtggggatgatctggccccctccgcggtggatggcgtcggcgtgcagggtgacgtcgtggacgtcgaagcgcacaccccgcatgttctcctcacacagtgcgccctgggggagggggagagccaccgtcaagggccggacacacctcggctgcttgccctccacctgccaagtcctgcaggtctccaccagggggacctggggccttgcccgccttggccccattagggtctctgtctcgggaggcaggaccatgaggtccctctagagcctggaaacgggtgtggtctgcacatgctgagccgtgcctcacctccttggtggcccactggaagccggccaccacactgtccttgatctcgttgaggtactgcacacccttggtgatgtcggtgaggatgttggggccggtgccgtcgggcccaaagcaccagatcttgcgggcctcagccacgtcccactcgtacttctcggccaggtagcgcgcccgctgcttgagctcctgacgggcggacacctcgcctttatcgatgtcctcggccaggccgtcggggaagggccgcgccttcatgtacagccggttgtgcttgttgggggacttggagaggcagagcacgttcgactcttcactgaccgtctcgcggtacgagacgaccgggtcagatttctgcaaaaagaggttaagtcccactcttgcctggagaaagaggtgaccttacacacagacgcatccttaaaagcttttcctagcaaggcggacctcatacagcctggtagagccacgtcaatcagaacgaagcggagtcagtgttgcagtgccaagcgcatctcactccagacaaggacaaggagcaggggctccactgagctctccggcgcagaaaccacgggcttgtggaattttaagcattaacagggaagaaacgaggtctggagcaggcctgtcccaacccctccagagcatttgtgttgtttgtggacagaagacagcaggatgtaactcaaaaactgccccggaggccgggcgtggtggctcacgcctgtaatcccagcactttgggaggccgaggcgggtggatcacgaggtcaggagatccagaccatcctggctaacacggtgaaaccccgtctctactaaaaatgcaaaaaattagccgggcatgatggcaggcgcctgaagtcccagctacaggaggctgaggcaggagaatggcgtgaacctgggaagcagagcttgcagtgagccaagatcacgccattgcactccagcctaagcaacagagcaagactcttgtctcaaaaaaaaaaaaaaaaaaaaaaaaaaaatagccctgggccaggcatggtggctcacacctgtaatcccagcactttgggaggccgaggcagggggatcacgaggtcaggagatcgagaccatcttgacttactaacacagtgaaaccccgcctctactaaaaatacaaaaaaaaattagccgggcgtggtagcacgcgcctgtagtcccagttactcaggaagctgagtgaggcaagagaatcgcttgaacccgggaggtggaggttctagcgagccaagatcacgccactgcactccagcctggatgacacagcgagactatctcaaaaaaaacaacaacaacaacaaaaacagccccacatgcctgtggaagactgcaaagaagaaacttgaggaacttaagaagctgagaccaagaccgagatcaagtctaggcgtctgcagagcctagctcagctcagctttaaagcagagggcaggtgtccggggtggggcgtggggaaggctggtcactggcgcctcaccttgatggggatgcaggcgtggtcctcctccaggtccttcaggcagatctccaggtgcagctcgccggcgcccgcgatgatatgctctcccgactcctcgatgatgcactgaaagggatgcgggtcagcaccaaaggggtaggcggctcggaacaggcgggaccaggctcccagcttccctttagctagggaccccgccagaacaagatttcagggaaggtgctgggaaactgggaccagcacaaactcctgaagaaatgttaagtcccacaagctacagtgaacacgcgcagagcagcctaggagagggtggtggctgcctgggcaggagtctccatttacagccacagccaagaacccctcctttcatgaccagtcaccccaatccaccaaccacagcaacccacacagccacaactcaggacacaagccgtcccccctcagggtgtctgctcccagcaggtgcactccgtgcccacctgcaccatggggtcggacttggccagccgcttcagcccctccaccagcttgggcaggtcagccgggttcttggcctccacggccactctgacaacagggctgacgctgaacttcatcacccgcatgttgtgcgcgtgctcgaaggtggtgatggtgcccgtcttcaccaggaactggtccacgcccacgaggcccacaatgttcccacaaggcacatcctcgatgggctccacgtagcggcccatcatcaagattgttctggaagaagcagaaggcggcagcaggccgcagggatggttgtgctggaccctggagggccagggcaggtccctcccggagttggtggccctcctgccaggtcccagggcagactggtggcttccacaaggccctgactgctgcgtcggggctgtcaggaaacatcctcttcagaatcactgccctcctccctgggtatgggtcgacggccgccacccacctgtgcccagggacacagatgagcaggggtgtgctgtgccctggggcttggagcttctccagaaatgccctcactgggctaagaacaaaagttgtggctggcacaagtatcaccctatattccttctatgctccttacttctagctcccgactgaggagcccaagacttggagcagggcagggcccgcaacagtgccaaggggcctgcacatcacccagctgctcacctctggattggcttcaggtagaggtcctccttcttcccaggggtatagttgggccccatgatcctgaccttcaggccagtggagaccagccccgagaagactcgtccaaaggcgtagaaccgacctttgtcggaggttggcaccattttggaaatatacatcataagagggcctttggggtcacagcttttaatgcctgagggacagagaaaacccgcaagctttattccagtgcagctcagccttctggaaccctgcaacccacaaccttgggcaacaggaagtcatccggctgcatctcagggcccggccaccgggaccacgtacccatggcagcctcgtcgtccgggggcccctcgtacaggagctcgcagcggtacttctgggccgtcacaggggagggcaggtggatggtgatcatctgcaacaaggcgtctccggcaggcagccagcggcgcatcacagcctgcgggggcagagagcggtgcatgagacacctggggagcccaggatggccccaccccgtacacgcttcctctcttgaagccaaggaagccaaagtcaggactaacgttctccaaagcacagtcccttctggaaggcggcaaaggccatgcacactcctgccaaggccctcacccacacctgtcccggatggggctggctgctgggatgtgtctccagcagcacccagagtctaaagcgaaaggggcagcagctgtccctgcccagctgaggacttcagcccccaggcctgggctgtcagagcatccggaaacagcagcctgtgttccctccaccccgagggctgggcccaggccgcaccttcagcaggggtttgccttctttgtccttgtcctcgctgtccagtttgatgtccagtttctctatcagttttgctgtctcctctttcttgaaattcatgatcgcatcaaacacctacattccccaccaagaaacaagaaagcccatttgggaacagcaggaggaagcctggcactgcttcctgcttggaagactcaggtcagcgcagggggacgcagcacgggagcaggagcaggcctggcctgcctaccacgggcccagccagctgagcggatcgggagctggaggaaacctcgtggtggagcagaggaaaaagcccactctgactcagacaaggacccaagttctgacttacaagcactgaaccgccaaagccacaagttattcaaccccctcaatgcaggagaggtcccaaggctctggctatgcagtccagatcttaagagaggagccctgactccacctcagttaggagctgtgcctcctcccatctcgcatctgccccacaaggagacgggcccagtcagccgacaggctaccggccggagcccacagggccgagggccaatagtcgcatcggcggggtgcctggcgcagccctcactcaccttgaagatggggtccaggatcagctggcagaaggtgcgtggcagcttcttcccttcggggctggtggctgacttgctgaacttgccgttggctgggtcaaagtacctggcaaggagaggccaagccaaatcaagttagggtctccaggggatgacttggggagggtggtcgccaaggggacatgcttgggcaagacctggtgggcttgagccacgctgtgaatagcacaccacgcccctacgtcgctgccactacccccaggtgtcaggaatcccccaccatatcccgcggggctcacctgtcaccccacagcttcttcatcatgtcctctactttcttggcccgctcggcaggccccaactggccctcccccttggcggcgaacttggccacatacatctcggcaaactgcttcagggtgaaggcccacccgtggaggccagacccaaagcccacggtaccgaggacaggatcgatctggaagtgtgagaaacgagaagcagccgtgagggcccctgcgcagagcctgaagctacgggctgggcgccttgggcatgggcctcagacgcaggctttcttcagtagacatctggtcaaagtgaagaaatgatcagtcatcacgaataggggggccagcccctccaccacccagggcagcgttccctgagctcgtctcttccagctgcccaaagatcaagggctgggtcaagtcggatgaaaacattccagcccccttctctgtcacccaacattcctggcaaaaacacacttccagtccccctcagctcaactccactccccaccggctcctgcagatcccgctgcggcaagcccaccacccagctagggagggccgtaccatgatgttgcccatggggccgctctcgccctcgccgtaggtggagatgatgacgttcacgttctccacgatgcgctggaaagtctggtagagctcctcgggctccagctgcagctccagcagggcgcggtccatcttgttcatcatcagcacaggcttgatgcgctcggcaatggcctgccgcagcactgtctccgtctgcacgcacacgcctggggacacgggggacagggcggcgctgtcatcctcaagcaaggatggcccccggttccaggccgtgcctcagggggacccactgcttacctgacacgcagtccaccaccaccaatgcgccatcggtgactcggagggcagcagtcacctccgaggagaagtcgacatgcccgggggagtcaatgaggttgatgaggaagccggcaccgtccttgctctgcttgatgaagttcaagtcattctccgagagctcgtagaagagggagatggcactgatggagggagggactcgtcagggggacaggagccacacacctggcccagggagtctgggatgctgtcagaagccaggctgctcctccctccatgactcatccctggagaggctcccacaagagccaacccacccttgtcctttgcctctgtccgagacatgccacccccatgacagggaactcctggtaccagccccatagccagatcctcagagccctcctgaccagacatcctgccccaccgacttggtcccaagattcatcacacctgactcaaagtagcaactaaaagacccagcaggacggcaaaagcctccagagactccgaccctcccctcctcacttctgcccctgctccaggggaaatgaagagccttagccagagtccctcaccaatgtaccaacccaggacaaaaagcagttggggtcaccgtactctgcgctccccctactcatatcggggccagaaactgacatggaatgaacatcatccagtgcaacacaggagcttcccagcgtcccaagcactagaacaccctcccctcccaggtgtgacagccaaacctctccagatattgtaggagtgggggcaagtcccccagggagggagaaccacggagttaagccccctcctcaagaaaaccttccagctcgcagtaccccgaatccctgtgcctctccatcctgtctcgctggactgaacctcactcattctcccatgaattaagaaaccaggggaaagagacgttgccaagtctctccccgcgcaccctggcccagtggcctccagctgccaggccagcacctccctgcctgggtacagagggcacagggagctcacgttgacttgatggtgatgcaacgctcctgctcgtccttccgggtatcagtgaagcgtgtctccccggcccgggccgaggcgatgatgcccgccttgcacaccagggagtctgtcagcgtggacttgccatggtccacgtgggcgatgacagacatgttgcggatgttggccttcttgtccatgatggcgcggatctggtctaccgtgaagttcacctgggcaagacaaggaggctcagaccagctcgtgatttccaggaacacagcatggcacggagcgttcagtccaaacgaaccagcatgcccaaggccaggagggggttggtgctggggtgccccaagcccaccgaatcttgccagcctaacaccccttaagagccaccccgcaatctccaaggaaccaccgttaataggtgtcattcatgattgacaacccagaaataaaagtgctcaggaataaaactgagtgtcaacagatttccttgataccaggtacaaatactaaagtctcatttggggccaaacacgtaagggatgaatcctctcctaaagccccctccacgttgtcaccgggccacccaaacttccccgagcaagaagcttcatcataaaatgcaaggtcaccccttggcaaacgggatcagacaaggccacccaccccaggaaataacggggagccggaacggccctaactgccacaagcctacacctcgtgtctcaataagagtctttgtacatctgggagtcataggaaggacaagtgcctaaggtcgacgattaacagcatcaggagaaggtatttggaaggaaaaggggagcctttcaggtgtcgctttgctcgttctgccattccctgccgcccctagtcccccggcagaaaatcgatctcaaactcgcggcccgcgggttacataaggcgcctccctgtctccccgcttccaccgcggtgcccgccattactacgcctgccacatcatcattccccacccccatccccgctaacaacccagctccaaccaggtctgggcaaggttatggcgccctcggaaacggagaaagggctcggtgaacagcgcggcgcacagacatggcggcggccgcttccccagccccgggtcctccggccccgccgccgctacgtctcctcctggcacggggggccccagcgtcccaggctaggcagcgtaggccccgcggaggccccgccgccgctccggggcaccagcgaggcagggttactcaccatggtggcggatggcggtggattctcccaggtagaaccgaaagaagcgagtcgcgccgaggatggcggcgacgacggcggaagagaacgctgacgtcaacactcagctttttataggcggacgccggttgggcgggtcatgtgactgcgctgcgaaggcggggcgaagggacgccgcgcaagcgcacggaggcgtgtccccccgcccgttaacccattcggcgccggcgcggcgctctagaatagaagctgggcatctcgggggcggtggtcgccctcggtgtgcagtgttcaggtgcacaaagtaaagagcgccgttttagctgagaacgagaaccatagcaacgatattagcttacaagttgtccagtacttctattaaaaccaatttacaaggtgaatagagtctgtggattatacccaagtcaatttccctgtttggacattgttacgtaagacgatacccctgggagaagccgagggaaaaaggacactcgcgaccactatactgtttttgcaactccttacctgtaattatttctaaataaaaactttataagaagcaggcatcggaatcactgatcccacaaatgcatactgagcatctatacaccaggcattgttaggggttttgtagatatagcagtggaccaaacaccttgctagcttgaccacactgcgtgttcttctaccagctactaggatttctctgtgcctcaatttcacctgctcggaggtgatcaataccaccctattgtttgggggagagtgaaacgaactaaagacatctaaaagaattaggaccgtgcctgatacccaacgctcaataaacgctatctattttaattagctaagattgctattaataaaacagttatttatttcaggactggtttgccatgtcccaggcacccggctaagcggtttactggcacaatttcattttctatttcatttcctctccagggggaggcgcaggaagactgtttagcatttgtgtcctaatctgaccctaagaaacagttgaatgtatttcatatctcatgaattggcattcaattgtgtaactctatcccttatgaaaagcccaacccgctgtttagcacatagtaggtactcagcatttcttgcatgaatgatgttctcacagtgcaaatgaaccccctgcggtacatctttccttaaactcactttgtgaaacaggagagccactgcagtgcttttcctgggctgggagagggggaggtgtggatccacaaaaagcaatgcaaattccagcctggactctaaaataaacctgtacactcctccccctcacgaatgcttcgggcactttgctttacaaagcgctgtctcaaccttgggtttcatttaacggatgattgctcttcctatcaccatttaacccagtggaaaactgaaaagtatcttccgaaaggattgaggctctgaaaggcagagggcgcggcagggagcagatgggagcgcccggggtccctaaccacctacacctgtacctgtgacgcgtttagttaagttgcaagtcaagcgcatgcgccatttggggcatgagtttttagcagaggggtagtcagtttcgcattattaataataaaattcttcaaaatttttaaatgcactgagcacctgctacgtgttgcgtttcctattgggggcttcgcagccgttttttccgtgcaaagtgggagcatttcagagatgtaatggaaaggttttcattaaaagaggtgtcaggcgagaggcggaggttgcagttagccgagatcgcgccactgctctccagcctggcgacagagcgagattccgtctcaaaaaaatttttaaaaattttaaaaattaaagaggggttaggctgcttgcggtggatcacgcctgtaatcccagcactttgggaggccgaggcaggcaaatcacctgaagtcaggagttcgagaccagcctacccaatatggagaaaccccgtctttactaaaaataaaaaaattagcccggcgtggtagtgaacgcctgaaatcccagctactttggaggctgaggcaggagaaccgcttgaacccgagaggcagaggttgcagtgagccgagatcacggcactgcatgcactccagcctgtgcgactgagagtaagactctgtctcaaaaaaaaaaaaaaaaaaaaaggagggggggctgttcacaggtatcccggaacttaataaaagaggggttgaatttcttctcaagtgcatgggttgcttattgaaaaattctaacatcatgtaatttaaagaactagggggagagcttaagggaaaaaggggaattttcaaccccataactgcagggatggagccaggtgttggcagggaaggatctctcccactgtcatccccacatccatgaagagcagaatcctggagtaccacaagcagccacaaccaggtcagctgtaataagtacaataataaatatacgctgggtcttttagggtggggaccaataaaaaaattcacctctgcagagaagctccgctgcgcatgcgcctgctgcggcgccaggagagctcagagaccgcagtagcggcccctgctgaccgacagtcgccagtgcaggcctctcgacactgcctttttttttttttttttttttttttttaagaccaagtctcgctctgttgccacgctggagtgcagtggtgcggtctcagctcactgcagcctccgccacccgattcaagcgattcacctgcctcagcctcccgattagctgggattacaggcgcctgccaccacacccgggtaatttttttgtgtttttagtagagacaggggtttcaccatgttggccgggctggtcttgaacccctgacctcgtgatctgcccgccttggcctcctaaagcgctgggattacaggcgtgagccaccgcgcccggccaacactgtcttttaacagtttattgagcgtttactaggacctgacctcacggtcctttaaatcaaatacttcagctaacctacccacaccctgggcttcgggtggcctcctttacgcctgagaaaatggagactcagataagttaagtcatttgcccacgttcacagagctagtaaaggtgcagccaaatccgactcaagtagtggtttaatcgggaaggagcccggtcctgcaaccgttgtctagatgcatttcagatttgggaaaacgggccgggcacggtggtttatgcctgtaatcccagcactttgggaggcagaggcaggcggatcatgagctcaggagattgagaccatcctggccaacatggcgaaaccttgtctctactaaaaatacaaaaaaattagctgggtgtggtggcacgtgcctgtaatcccagctactcgggaggctgaggcacgagaatcgcttgaacctaggaggtggaggttgcagcgagctgagattgtgccactgcactccagcctgggtgacagagagagactccgtctcaaaaaaaaaaaaaaaaaaaaaggccgggcgcggtgggtcacgcctgtaatcccagcactttgggaggccgaggcgggcagatcatggggtcaggagatcaagaccatcctggctaacatggtgaaaccccgtctctactaaaaatacaaaaaattaaccgggcatggtggcaggcgcctgtagtcccagctactcgggaggctgaggcaggagaatggcgtgaacctgggaggcggagcttgcagtgagccgagatcgcgccactgcactccagcctgggcgacagagcgagactccatctcaaaaaaaaaaaaaaaaaacaaaaaacgtggtggctcacgcctgtaatcccagcactatgggaggccaaggcgggcagatcatgaggtcaggagttcgagaccagcctggccaatatgatgaaaccccatctctactaaaaatacaaaaattagctgggcatggtggcagacacctgtagttccagctactcgagagactgaggcaggagaattgctggaacccgggaggtggaggttgcagtgagctgagatggcaccattgcactctagcctgggcaacagaccaagactctgtctcaaaaaaaaaaaaaaaaaaagtggattttgtcttttagatgattaaacaaatgggttcagggaggcctggtgagtctgtgtagtaagaacaggcgcaatggctcacgcctgtagtcccagcactttgggaggcggaggtgcgtgaatcacttgaggtcaggagttggagaccagcctggccaacatgacgaaaccccatctctactaaaaatacaaaaattagccgggcatggtggcaggcgcctgtggccccagctactcaagaggctgaggcaggagaattgcttgaactcaggaggccgaggttccagtgggcagagatcacgacactgcactccagcctgggtgatagtgggagactccacaccctgaaaagaaagaaaaaaggccgggcgcagtggctcatgcctgtaatctcagcactttgggagaccgaggagggcggatcacaatgtcaggagttaagacaacagcctggccagcatggtgaagccccgtctctactaaaaatacacaaattagctgggcatggtggcgcgcctgtagtcccagctactcgggaggctaaggtaggagaatcgcttgtccccgggaggcagaggttgcaatgcgcctagatcgcgccactgcactccaacctggacgacagagcgagactccatctcaaaaaaaaaaaaaaaagaaaaagaagataattgaaacaattaccctcccaggtagaaagtccctgctgatggggtgcatctgttcagcagcggtgttgagagctcaagctctttttaacgctttgccttgctgtctccaaagtattgccttcatcctcatagttcaaagtgtccaccatcacattcacgtttcagccaataggaagaaggaaagagaaaaacaggaaaagagtttacatgccactcctgctattggtcagaatgtgtcacgtgaccatactcagctgcaagggttggtgggaaatgtagtctttttttctgggaggccatgtgttcggcttaaaattgtctttttttctttttctttatttcttttttcttttctttcttttttttagacggagttttgctcttgttgcccaggctggagtacagtgacgcgatctaggctcactgcaacctccgactcccgggttcaagcgattctcctgcctcagcctcctgagtagctgggattacaggcgcacaccaccacgcccagctaattttttgtatttttagtagagacggggtttcatcattttagccaggctggtatcgaactcctgacctcagatgatccacctgcctcggcctcccaaagttcagggattaccagcgtgagccaccacgcccagcctttttctttccttccttccttccctccttccctccttccttccttccttccttctcttcctttcttccttcgttccatccttccttcctttttttgttccttctctcctttcttccttcttttttttctttccttacttgttgtttcttttttcttttcttttttgtttttctgagacagagtcttgctgtgttgcccaagctgcagggtgcagtggtgcattcatagctcattctagtcttgaactcctgcgttcaagcaatccttctgtttcagcctccatattggcaggcacgcaccaccacatccaggtaatttttaaatttttttagagttagaatctcactatgtccccgaggctggttttgagctcctaacctccaggaaccctcctgcctctatcgatttcttttattttattttttgtagagacagggtcttgctgtgttgcccaagctggtcttgaactcctgggtccaagggatcctcctacttcagcttcccaaggtgccggatgacaggcatgaaccattacactcagccagtttttttgttttccttttcacaaagcaccaaagaagaagcacagttgtgttgtttgttgtttttttgtttgtttgggggtttttgggtttttttgagatggggttttgctcttgctgcccaggctggggtgcaatggcgcgatctcggctcaccacaacttcttcctgggttcaagcgattctcctgcctcagcctcccaagtagctgagattaccacgcccggctaattttgtattttttgtagaaacggggtttttccatgttgatcaggctggtctcaaactccggacctcaggtgatccacccgccttggcctccctaagtgctgggaatacaggcgtgagccaatgcacccggtctaatttttgtatttttagtagagacggggtttcaccatgttggccaggatggtctcaatctcttgaccttgtgattcgcctgccttggcctcccaaagtgctgggattacaggcgtgagccactgcgcccggcctttttttttttttttaattgagatagcgcaatctcagctcactgcaacctccctttcccaggctcaagcaattctcctgcctcagcctgttgagtagctggaattacaggtggccgccaccacgcctggctaatttttgtatttttagtagagatgtggtttcgccatgtcagccaggctggcctcgaactcctgacttcaggagatgggcccaccttggcctcccaatgtgttgggattacagatgtcagccaccatacccagccttttttttttttttttttttttgagatgaagtctcactcttgtaccccaggctggggtgtaatggcatgatctcggctcactgcaacctctgtctcccagaatcaaatgattctcctgcctcagcctcccgagtagctgggattacaggcgcctgccaccacacccagctaatttttgtatttttagtaaggacagggttttatcatgttggccaggctagtctcgaactcctaacctcaggtgatccgcctgcctcggcctcccaaagtgctgggattacaggcgtaagccaccgcacctggcctgttttcatttttaaactttttttcttctttcaacttattttaagatctggggtacatgtgcaggatgtgcaggtttgtcatacaggtaaatgtgtgccatgattgtttgctgcacagatcaacccatcacctaggtattaagccccacatcccttaactattcatcctgatgctctccccgccccccacccccacgtcctaaatttttttttttttttttttttgagaaggagtcttgctctgtcgcccaggctggagtgcagtggcgccatctcagctcactgcaagctccgcctcctgggttcacgccattctcctccctcagcctcccgagcagctgggacgacaggcgcccaccaccacacctggctaattttttatatttttagtagagacggggtttcaccgtgttagccaggatggtctcgatctcctgacctcttgatccacccactttggtctcccaaagtgctgggattacaggcaggagccaccgcgcccggccaattttttattttttgtagagacagggcctccctacgttgcccgggttagtcttaaactcctggacttaagcaatcctccagccttagctgcccaaagtaagggtatacaggtgtgagccactgggcctggccaacatttcttattctgaaataattatagattcaaagggagctgcacatataggacaaacaggtcctacgtgcctgtcaccaagcttccctcagtggtcacatcttatgtacaacatccgaacaagaaatatgacattagtacaatgtgtgtatacatttccaagttattgtagctggacactgtggctcatacctggaacccagcactttgggaggccaaggaaggaggatcccttaaaaccaggagtttgagaccagcctgggcaacatactgagaccctatctctaaaaaaaaaaaaaaaaattagctgggggtggtggcacatgcctgcagtctcacctcctagggaggcttgagcccaggaggtcagggctgcaatgagctatgatcatgtcactgcactccagcctgggcgacagaatgtgactctgtgaaaacaaaaacaaaggctgggcgcagtggctcacgcctgtagtcccagcactttgggaggctgaggcgggtggatcacctgaggtcaggagtttgagaccagcctggccaacatggtgaaaccctgtctctactaaaaatacaaaaattggccacgcgtggtggtgagcacccgtaatcccagctacacgggaggctgaggcaggagaatcgcttgaacccgggaggcggaagttgcagtgagccgagatcacgccactgcactccagcctgggcaaccagagcaaaagtttgtctcaaaacgtatgtataaataaataaaacaaaaacatacagaactatttcatcaccacaaagatcactcttctgttacctccctattgtcacaactattcccctccccatggccctgccctgatccctggaaacaactgacctgtgttccagctctataattctgtcatttcaataacctttttgttgttgttcttgttgtcattgtttcgagacggagtctcactctgtcgcccagctggagtgcagtggtgcaatctcaactcactgcaacgtctgcctcccgggttcaagtgattctcctgcctcagcctcccgagtaactgaaattacagatacccgccaccacatccagctaatttttgtatatttagtagagacaggctttcatcatgttggccaggctagttttgaactcctagcctcgagtgatccacccgccttggcctcccaaagtgctgagattacaggcgtgagccacagtgcccagcccagattggcttttgccccccactcagcagaatgcccttgagaccctcttgtcctttctaaattaatggcaatataataatatttcacaattcctgagggcttactgtgtaccagacactgagctaaatgctttatggccctacaatcaccctgtaaaatagatacaatttgtggtgcccagcctgcacgattgtcccaacgaatctgccctcctgacatccgggtatgacctgctcacattgaacagggctgagctttataggatgttttgaaaatgggagcgtgcaggccgggcgcggtggctcacgcctgtaatcccagcactttgggaggccgaggcgggcggatcacgaggtcaggagatcgagaccatcccggctaaaacggtgaaaccccgtctctactaaaaatacaaaaaattagccgggcgtagtggcaggcgcctgtagtcccagctacttgggaggctgaggcaggagaatggcgtgaacccgggaggcggagcttgcagtgagccgagatcccgccactgcactccagcctgggcgacagagcgagactccgtctcaaaaaaaaaaaaaaaaaaaaaaaaaaaaagaaaatgggagcgtgctgtttcaggttaggctatacaagacatcgtggcaggtcccagtagctcacatcgtaatcccagccttttggaaaaggggaggattgctcgaggctagcagttcaagaccagatttggcaacatagggagaccccgtatctaccaaaaaatcttttttttttttttttgagacagtgtctcactctgcagccaggctggagtgcagtggcacaatctcggctcactgcaacctctgcctcccaggttcaagtgattctcttgcctcagcctcccgagtagctgggactactggtgaccagaaccatgcccagctatttttttttgtatttttagtagagatggggtttcgccatgttggccaggatggtctcgatgtcttgacctcgtgatccacccgcctcagcctcccaaagtggtgggattacaggcgtgagccaccgcgcctggccctccagaaaccttttttaataagctgggcatgatggtgcacccgtgtagtctcaactacttgggatgctgaggcaggagggtcacctgagcccaggacttttttgtttttttttttttgagacggagtctcgctgtcgccaggctggagtgcagtggcacaatctcagctgactgcaaccctccaccttctgggttaaagcaattctcctcatctctacaaaaactgcaaaaaaattagctgggcatggtggcgtgtggctataaaaccagctactcaggaggctgaggtgggaggattgcttgagcctaggaggcggaggttgcagagagccaagatattgccactgcactccagcctgggtgatagagtgagactcagtctcaaaaagaaaaaaaaatagtaggcgggtggttattcctatgaaagagacttctgtgtccctgagaaaatgccctgagggtggggtggtgggagagagaacaaattccttaactcccaattcaattatttacttatttatctttagacagcatctcactgttacgcaggctggagtgcactggtgtgatcatagctcactgcagcctcgacctcccaggctcaagcagttctctcacctcagcctcccgattagctgggactacaagttcacgccaccatacctgggttttttgttgtttttttttaaattgagatggagtctcgctctgtcgcccaggctggagtgcagtggcgccatctcggctcactgcaagctccgcctcccgggttcacaccattctcctgccacagcctccccagcatctgggactacaggcgcatgccacgacacccggctaatttttctgtatttttagtagagacagggtttcaccgtgttagccaggatggtctcaatctcctgaccttgtgatctgcccgcctcggcctcccaaagtgctgggattacaggtgtgagtcaccacgcccggccatacctgggtatttttaagattgttgaagagatggggtctatgttgcccaggctggtcttgaactcctgagctcaagcaatcctcctgcctcagcctcccaaagtgctgggattctaggcctaagccccggcgcccaacctgtcccccaattagattatatttgtttatacaatctgttttatttatttatttacttatttattttatttttttgagatggagtctcgcgtgttgcccaggctggagtgcagcagcatgatctcagctcactgcaacctctgcctctcgggttaaagcgattctcctgtctcagcctcctgagtagctggaattacaggtgtgtgccactatgcccggctaatttttgtatttttagtggagacaggggtttcaccatgttgcgtgggctggtctcaaacttctgacctcaggtgatcctcctgcctcggcctcccaaaatgctgggattacaggagtgagccactgtgcctggcctacaatctgttttagagccagaaaatgcaatcaattgtgataatacattgctatgttttgaaatacatatatacaaacgtgcacacaactttatttaaatttaagatgcttttaatattcagctaacaccaaattcacaatttgatactttttttttttggtaaagatggagtctccttctgtcaccgaggctggagtgcagtgtcctcatctcggctcactgcaacctctgtctcccaggttcaagagattctcctgcctcagcatcctgagtagctgggattacaggtgcgtgccaccacgccccagtaattttttttgtatttctagtagagacagggtttcaccatgttggccaggctggtctcaaactcctgacctcatgatccacccgcctcggcctcctaaagtgctgggattacaagcttgagctaccgcgcccagctcataggtatttttgcccaggaaacaactccatttacttaagtgcaaaacgggagtaactatctgtatctatatctacctctctccatctatctctatgtatcttacataacagtggaggtggtttgtgaattttgtcagaattgcaaaggatctgatttagaactgatgaattctgtcctaaaacaggctgtaaagctttaaattggtcgtgtggggattttccatagcctccctctcctctttcttgtctgtctacctcccatcagtgtctgaacatgttctgtatttagcctttttttttttttttgagatggagtctccctctgttgcccaggctggagtacagtggtgccatctcggctcactgcaagctccaccttccgggttcaagtgactctcctgcctcagcctcccaagtagctgggactacaggcgtgtgccaccacgcccagctaaatttttatttttggtagagatgggttttcaccatcttggccaggctggtctcgaactctgggcctcaggtgatccgcccatgtcagcctcccaaagtgctgggattacaggcgtgacccaccacgccgggacctttaattagcttttgattttgtttgttgttgatctccctcctggaatgccagttccacgaggacagggaattttgcctgttgtggtcaccactgtgtctgagcatctctaacaaagactagcaagctacagccctcagccctaatctttttttttttttttttttgagtctcgctctgtaaccaggctggagttcagtggcacaatctcggctcactgcaagctccgcctcccgggttcacgccgttttcctgcctcagcctcccgagtagctgggactacaggcgcccgccaccatgcccggctaattttttgtatttttagtagagacggggtttcaccgtgttagccaggatggtctcgatctcctgatctcgtgatctgcccgcctcggcctcccaaagtgctgggattacaggcatgagccactgcgcccagcgtattattattattattattattattattacttttgagacagagtctctctctgtcacccaggctggagtgcagtgacacaatcacggttcactgctgcctggaactcctgggctcaagccatccacctgagtaggtaagactgtaggcgtgcaccaccatgcctacttaattttttattttttgcagagagaggatctcattatgttgctcagtctggtgtagaaatcctgtgttcaagcagtcctcctgcctggatctccaaaagttctgggattacacacccgacccacagcacccggccttctttctcttttaaatgttcaaacaaaagcataataataacatgacatgtgaaaatacgtaagattgaaatttctgtgtttatgaagttctactagcatacaggcctggctcagtggttcacacccgtaatcccagcattttgggaggtccaggagggcagatcactcgaggtcaggagttcaagaccagcctggccgggggcagcccccgcccggccagctgccccgtccggaagggaggtggggggcagcccccgcccggccagccgccccgtccgagaggtggggggcgtctctgcccggccgccccgtctgggaagtgaggagcccctctgcccggccgccaccccgtctgggaggtgtacccagcagctcattgagagcagaccatgatgacgatggcggttttgtcgaatagaaaaagggggaaatgtggggaaaagaaagagaggtcagattgttacgctgtctgtgtggaaagaagtggacataggagactccattttgttctgtactgagaaaaattcttctgccttgggatgctgttaatctataaccttacccccaaccccgtgctgaaacatgtgctgtgtccactcagggttaaatggattaagggcggtgcaagatgtgctttgttaaacagatgctagaaggcagcatgctcgttaagagtcatcaccactccctaatctcaagtacccagggacataaacactgcggaaggccgcagggtccgctgcctaggaaaaccagagacccttgttcacatgtttatctgctgaccttccctccactagtgtcctatgaccctgccaaatccccctctccgagaaacacccaagaatgatcaatgaatactaaaaaaaaaaaaaaaaaaagaccagcctggccaacatggtgaaaccccgtctctgctaaaaatacaaaaattagctgggcctggtggcgtgcgcctgtagactcagctactcaggaggctgaggcaggaaaatcttttttacctgggaggcggaggttgcagtgcaccgagatcaggcccctgcactccagcttgggcaacagagcaagactttgtcataaataaataaataaaataaaataaagttttactagcacacagccatgctcatttgtttttcttttttcttttcttttcttttttgagacggagcctcgttctgtcggccaggctggagtgcagtggtgtgatctcggctcaccacaacctccgcctcccggttcaggcgattctcctgcctcagcctcccaagtagctgggactataggtgtgcaccaccacgccctgctaattttcgtatttttagtagagatggggtttcaccatattggccaggctggtctcaaactcctgacctcatggtccgcctgcctcggcctctcaaagtgctgggattacaggcgtgagccaccgctcccggccagccatgctgatttgtttatttatagtctacggtttcttttgcccttagatggcagagttgagtaattgctctagacattatatgtggtccaaaagcagaaaatagttatttcctggatctctacagaaaacgtttgcagatccctgaaccaaaacagtgccttgtatacagtaggtgcttgataatacagaaagattattgtttgcatgtctttttaattttttatttttgagacaaggtcttgctctgttgccctggctggagtgcagtgccactatcacaactcactgcagcctcgacctcctgggctcaagcaatcctcctgccttggcctcccaaagtgctgagattatgagcgttaagctactgtgcctggtcattacttgtatatctgatgtaagaaggggaggtgttttagcctttggagacagctggatgcagattaagacagtggtttaggctgggcatggcagctcaagcccgtaatctcagcagtttgggaggtcaatgtaggaagatggtttgaggccaggagtttgagaccagcctaggcagcagagtaaaactccccctcccaaatctacaaacaaacaaacaaaaaaacaaaacaaaacaaaaaaaggccagatgtggtggctcatgcctataatctcaacattttgggaggccaaggcaggtagatcacttgaggtcaagagttcgagaccagcctggccaacatggcaaaaccccgtctctattagaaatacaaaaattagctgggtgtgttggcacgaacctctaatcccagctactcaggaggctgaggcaggagaacagcttgaacccaggaggcggaggttgcagtcagccaagattgcacccagcctgggtgacggagtgagactctgaatccaaaaaaaaaaaaaaaaaaaaaaaaaaaagatagtggcttagccaatgcctgggcaggtgttcccatctgatactggctttcatcatcacagaatgggggctgatacagacgcagctaacatggaaacaccttattctgacagtttctaggacagggctcagcaatttttttgttgttgttgagatggagtcttgctctgttgcccaggctggagtgcagtggtgcgatctcagctcactataacctctgccttcagggttcaagcaattctcccgcctcagcctcctgagtagctgggattacaggtgcccaccatcacacccagctaatttttgtatttttagtagagacggggtttcaccatgttggccaggctggtctcaaactcctggcctctagcaatccgcctgcctcagcctcccaaagtgctgggattacaggtatgagccactgcaccaggccacggctcagcaattttaggtagagagcatcctgagtccctcctgatccacccttcaggttcaacaattggcaacacatatattccattttgttttatttttctccctcaatactctccccattatttcttttctttttttttttttgagacagagtttcgctcttgttgcccaggctagagtgcaatctcggctcaccacaacctctgcctcccgggttcaagcgattctcctgcctctgcctcccgagtagctgggattacaggcatgtgccactacgcccagctaattttgtatttttagtagagacagggtttctccacgttggtcaggctggtctcaaactcctgacttcaggtgattcgcccgtctcgggctcccaaagtgctgggattacaggcgtgagccacagtggccagcctcttcctgttatttcaatgcaaatcctataccatttcttctgtaaatatgcttggcagttatttgtaactgataaggactcttcattgatttattataattattttagagacagggtctagctatcactcaggccagagtacagtggtgctatcatagctcactgcagcctcaaagtcctgggctccagtgatcctcctgcctcagtctctggagtaggtggcactaaaggtatgtgcctccatggccagctaatttaagaaaaaatttggggtcaggcgcggtggctcacgcctgtaatcccagcactttgggaggccgaggcgggcggatcacgaggtcaggagatcaagaccatcctggctaacacagtgaaaccccttctctactaaaaatataaaaaattagccaggcgtgctggcaggtgcctgtagtcccagctactcaggtggctgaggcaggagaatggcgtgaaccctggaagtggagcttgcagtgagccgagatcgtgccacccagcctgggcaacagggcaagactctctcaaaaaaaaaaaaaaatggggggggagctgggcgcagtggctcacacctgtaatcccagcactttgggaggccgaggaaggcagatcacctgaggtccagagttggagaccagcctggccaacatggtgaaaccccgtttctgctaaaaatacaaaaattagccgggtgtggtagcacgcggctgtagtctcagttagttgggaggctgaggcagaagaattgctggaaccaaggagacggaggttgcagtgagccgagatcacgccattgcactgcagcctgggtgacagagccagactccatctcaaaaaaataataataatttttttgtagagatggggatctcgtgttattttgccctggctggtctcaaactcttgggcttaagcaatcctcctgcctcagcctcctaaagggctgggattataggcttgaagcaggcacccagcccaaaacatattttaaaacacagacacagtaccatgattacacagaaccttcaaaccacaagggttgcaggaatctacaagtgagacaaaatttctctcaactgccaagcacgctgtctcatgcctgtaatctcagcacttttgggagattgaggcaggtggatcatttaaggtcaggagttcaagaccagcctgggcaacatggcgacaccccgtctctactaaaaataccaaaattagctgagtgtggtggcgcccgcctgtaatcgcagctactcaggaggctgaggcacgagaattgcttgaacctgggaagcggaggttgtagtgagctgagatcgcgccactgcactccaaactcggcaatagagactctgtctcaaaaaataataataataaataatagaaccaaacacacacagaggaaggtacatgtaaaaacgggtgcaatcgaaataatgtctgcactcgagttgattccattatactaacatcaacgcccaggttttgacaacataacatggctatgtaaaactttttttgaatcttttttttttttttttttttgagatggagtctcgctctgtcacccaggctggagtgcaatggcgcaatctcagttaactgcaacctccgcctcctgggttcaagctttttgtttgtttgtttgttttacatggagcgttgctcttgttgtctgggctggagtgtgatggcacaatctcggctcattgcaacctctgtctcctggggtcaagcgattctcctgcctcagcctcctgagtagctgagcttacaggctcccgccaccatgcccagctaatttttgtatttttagtagagacaggagtttcaccatgttggccaggctggtctcaaactcctgacctcagttgacccgcccgccttggcctcccaaagtgcagggattacaggtgtgagccatggagcccagccagttataaaaatactatcactggggaaagctgggagaaaggtgcacaaatctctctgtactatttttgcaacttcttgtgaatctgaatcttcaccaaaacaaatacaaattatacttaaaaacaaaacctggccaggtgtggtggctcacacctgtaatcccagcactttgggaggctgaggctggcagatcccttaaggtcaggagttcgagaccagcctggccaacacggtcaaacctcgtctctactaaaaataccaaaaattagccggtgtgatgatgtgcacctgtagtccccactgcccgggaggctgaggcaggagaatcacttgatcctgataggtggaggttgaagtgagccaagatcccaccactgcactccagcctgagtgacagagagagaccctgtctcaagaaaattaataaattaaataaaattacaaaaatgagccaggtatggtggcacacacctgtaatcccagctattcgggaggctgaagcacaagaatcagttgaacctgagaggccgaggttgcggtgagtcgagattggcaccaccacactccagcctgggtgacagagcaagaccctgtctaaaacaaaacaaaacaaaacaaaaacaaaaaaacccaatcccccgcagaatcagcagggccggaatgaaggtaagactcatacgtgcaatggcagagctggggttttgctgtcaatggacaacatttcaacaaatctaaggaccttaaccggcttcattgcaatttgctacacttcattccataaaataggataactgttccaatcagttgggcagaggaggttggctctacaggaagagaggggttgtagagagcaaaatcaaagaacaggctgggcggggtggctcatgtctgtaatcccagcactttgggaggatccccgaactcggaagtttgagagcagcctgggcaacttggcaaaaccccatctcgacaaaaaatacaagaattagccaggcgtggtggtgtgcacctgtagtcccagctactcaggaggctgaggtgggaagatcacctgagcccgggcggttgaggctgtagtgagccatgactgagccactgcacaacaacctgggagacagaaacctatctcaaaaccaacagcaacaacaacaacaaaaacccaacagcaaagaatgtgttaactcattagtgttaccatcaggttgtttcaggctagtttttttttttttttttttttttgagacggagtctccctctgtcgcctaggctggagtgcagtggcgcgatctcggctcactgcaagctccgacttccgtgttcatgccattctcctgcctcagcctcccaagtagctgggactagaggcgcccgccaccaagcccggctaattttttgtatttttagtagagacggggtttcaccgtgttagccagggtggtctcgatctcctgacctcgtgatccacccgccctggcctcccaaagtgctgggattacaggcgtgagccaccacacccggccaggctagtttttttgtgtaaggattaaagaaattaagcagagggaattttaggacattggccactgaaggctgaaactggcctgtttggaaaattggttggccggatcatctaaggtcagtagttctcgactagtctggccaacatggcgaaaccccgtctctactaaaaatacaaaaaaattagccgggtgtggtggcgggcacctgtaattccagctactcaggaggctgaggcaggagaatcgcttgaacctggaaggcagaggttgcagtgagccgagattgcgccattgcattccagcctaggcgacaaatgtgagactcctcctggaaagaaagggagagagagagagagagagagagagaaagaaagagagaaaataaaataaaagagaaaatgggctgatagggctccctcctggttttcccaaaggtcagataacaacttagcttcgtcattgtgacttagaatctgagtgtgactagctgcattttgtttattcctgtgtcttggtgcctagcacaagagtttagtctaaaacaaccgcctcctataattttgtcgcccaggctggagtgtagtggcatgatcaaagctcactgcagcctccaactcctgggctcaagcgatcctcctgcctcagcctcctaagtagctgggaccacaggcgcacactcctacgtctggctctttacttaaaattttggtatttcaggccgggtgcggtggctaacacccatgatcccagcactttgcgaggccgaggccggtggatcacctgaggtcaggagttcatagaccaacctgaccaacacagtgaaactccatctctactaaaaatacaaaaatcagctgagcgtggtggtgcccacctgtagtcccagctactcgggaggctgaggcaggagaatcacttgaacccgggaggcagaggatgcactgagccgaaattgcgccactgcactccagcctggcgccactgcactccagcctggtgacaaagcaagactccgtctaaaaaaaaaaaaattagctgggtatggtggtgcatacctgtaatcccagctactcgggaggctgaggcaggggaatcgcttgaacccaggaggcagaggttgcagtgagtggagatcgctccattgcactccagcctgggcaacacagcaaggctctcaaaaaaaaaaaaaaaaaaggctgggcatgatggctcatgcctgtaatcctagtactttgggaggttgaagcgggcagatcacttgaggtcaggggttgcagaaaagcctggccaaaaaaaaaattagctgggcgtggtggcagtcgcctgtaatcccacctacttgggaggctgaggcaggagaatcccttgaacccgggagatggaggttgcagtgagctgagatcgcgccattgcactccagcctgggcaacaagagtaaaactccgtctcgaaaataaataaataaataacaatttggtatttcatccatcatggactcttttgcactgatttttttatgtttaaagtgttggactagccaggtgtggtgactcgcgcctgtaatcccagcactgtgggaggcccagacagaaggatcatttaagcccagacattcgagaccaccctggataacataatgagatcctcgtctctacaaaaataaaaataaaaaataaattgcactaaaatacttgattattgaagtttgaaatccacttctacgggcacgaagccacttagctccaaagccaaggagcgctttggagaagaggtcccaactggtgcagatccaaggtttcccatgggtggggaggcaggatggggggggcgcctgcaaagaggtgagggctgtacgatctccaaggaatttgggagcaggggtcccgcttttctccgccgggcgcccccagccagctggttgccgagcccacgccccatctgcacaccaggacccggatgtgcagcgcgcggggtgtctgggcccgtggagcctgcaccgcgctgcgctgcaaggcgcctcactgtacgcactggcggccgttgcggcggagcaaccatcccctgcccgacgccgccgggagtctggagacgcacctggcggccgccgcgcgcaggaagccacggcacctagctgcattgttgtcgctgccaccgccccctctcgccttccctccctagaggaaaccgagcacccgtccccacctgcgcagggctagtaccactttaaggagtcaggcgccgccggggtaggcgtggtcgccgcgagcgggggggggggcgctggtgtaggacggacctgattggccggaggcccgggcggtggccgcgcgcgcctgcgcaggaggcagcagcgcgcaccggcggcgggaggagcgcgcgcgggtgctaattggcccgggcggcggccccgcccgcgagtggtgagcggtcacgtgacgcgacggctgggggctcccggcgcgggggacgctggtgaccaagatggcggcggagctggtggaggccaaagtgagtgagcggtggcggcgccggccggggcaagtgggcgagagggcgggggccgggccgcaggtcgaggtctgcgccttctgtccggggccccacagcgcggccggcccgcggctcgccgtcccggcccccagaccccgacccccggtctcagggtgagggcggggggcggggaggccgggggcggggccctcctgcctcacccaggtcttcgcgccgggggtcgctcccccggcttcaggcagggtccccccacccagcccgagcccttagggtcccggtccctgagcgccaggccagggccgcgcctcccggttgaggcaccgtcccgccgggatgcgggacgtgttgagctactcgttgccctcttggttccgagccggggtccttgctttttggctggtgtgttggggggagtgtctgcgcctccccgcccacagggctcccaggactgctatctgggtctcgtccccgcccaacaggccaggctggggtttgcgagtctcctgctcggaagggtcccccgagtcctggatagtgtcctgccaccgtccaggtggaggagtcagggccctgagaccacccccaagacacggcacgtcctcttggggtctggagttcaggctcggtcttgagcccctcttcagctcctgcattggtcccagaaccccgcccccttcccgacaccgtctctcacacgccggagtgggcgcttgggggaaggctgggccctccctttccctccccataggatggagttcggaccactcttcttggtcacagaccttctttattctcctttttttaatcttaaatcctggactgtgctttggtcctacctcgttcctctcgggacagaatctgaggctactgattctgcttcagggggctctaaacctcacctgtgcagcatcagatactgtcctcaaaccttggctgcttctcctattttctgctcttgagcgagtctacttcttaggtcagacacccaccctccccctacacagcccccagaacttttatgcaccccaactttggtttctaaggtcccctctctttctgcctattctcttttgttgatctctggagggtccccactgggtccaaggctggcctctttagaacaactgttgctgctgctctattatactttgggtcctgtccaggtcccatgtcccatagataccatctcctagcttggaaccacttttaatcatcctgggattgagctcagagtatccccattccaggggatgtaccttcttgtaggtgcctacctagagctgagggtctaaaacccttagaagtgcccgcaaggccacggcttccggggaggttaggggacctctccctcccccatcccctttcacatcttccctccccacggtcctgacctgtacgtatcttcttctcggtcctctcacattaccccctgggatctgaaaacacagcactcagggctctgtgattatagcatatacctctcttcgcctcccaaccctacacccctgcgcacacttctgctcctctctagagttttgaaaagtggagactcgccctggagatgtggaggcctgaactctgtaaacccaaagtggcaggctctgggcttgaagtgtcctggagtcctgaaatgtaacctcccgtttcggggcttggagctgtgaccctggaccccaacccccaccctggctgagggcagggtctgcactcttttgtaccatccaggccttgaaatatgatctgatgaactttccttaaccctctggtggctgggcccccccccaccccaattaaatcaagttgacccttctttcaggttctctaaaccgtgagcctccattcaagggggcctggaccctggggaaccttctttctccttgagtctgttgctacctctccaagtaccttaaatgtcattgaaacatccccttctttacaggggccttccccagcctgtcatattcatggctgcagattctgtcttttggggtgcatcacagactgctcggaggggcgaatgttgggggtttgttggtgaactttgaaatctgagactctcagcttgaggcctgcaggcgggtttggggcaggggtgtctgtgagctccctgaaatagtccacagcgtttcgcacagatctccgctttcctggagagaggcgccttcctgagctacccccggtgctctgaggggcctatgctggaggaaaggttcagcgcagctgctgtgtctcggctgatgtctccccatgcgacttccaggcaagcctggagttgaaactctggaagctgccggggcctggcactgtttataaacacagctctgacggcaagcaggtcagcttgaagccagggcaggaagtgatcttggggcatttggggcttcttcctgaatgcttgtcccccccgcactccctccagtgtcaagggcaggctcctccgaggtggcagctgctgggaaatctgagtcgtgaacatatggccacctaaggggtgtgctccgggaagcgggagctgcggctccactgtccagcctgggtggggcaggggctcccggggtgcgaggatgtcagcaggttccccagcccacctgccttcggccagtctgccagtgtgaagtgtccacatgacatcgtctctccctgctaaggctttgggccacttccagaagaaacatcttgtctgcaagcctttttgttttctgcacaaggtaggaagtcaggccaagggagatgaggcatttttgttttcaaagcatccctgactctcaggcccagcagaccatgcaggtccccatagccagtgtgctggtgagtgagggtcccccgggcagcagacgggaacacccttgggaggccagaggccgaggggccgatgccagtcccacgcatgtactagggaggctctgggccagcctcttccctctgtgagcctcggtttcctcacctacacgatgggtgtcctcattgtgaaattagcgacacaggccttgctggtgcctggtagggagcaagacgctggcatcccgattctttacagtcacggggccccgcagccctgatatgggaagaggcttctcccgaggctctttgggcagggctgggccgcctgcacgtgtgtccctgtcattttgagcctggacagcctctccgtctccaacaggaccctggcccgatacagctggaagaaatcagagctgacagatgaggacccgacagtgggccccggctgctgcagctttggtgctgaaatgtgcggctaggctcctggtctcaccctggggcagccaggagccggaaacctcagcgcctcctggcacggaggctgcagtttacataccccactgggactgcctctggcttcgaccctcagggtctttcgagtggagtttgaatggtttattggtttcttcgggtacccgccagctttccttaacacccttgacgcttgagctttctccccattcctcctggaagctactgtttcccaccacatctcattcatcccaggccagcttcagggctaagggtgggtggccctgaaaccctgccagcccatccctcgaggacacctggcttctgcagcctgttgaggagccttccttccccttcagggtcctacccctcatggaggtcaggccactgccagtctaccccacctcaaacaccagggtcagctgggctctgctgtttggtttttatttcgctggagaggcccggccaggcgatgagggccaggtcctgccaagcctcatttgtcgctttgacccaggtcctgcaacagcccctgtggctgctatcttccccttggaccggtcccccagggactcagggcaacgtgtggaggtgtgtttggtgtggaggtgtgtttggtgtggaggtgtggggggtgtggaggtgtgtggggtgtggaggtgtgtggggtgtggaggtgtgtggggtgtggaggtgtgtggggtgtggaggtgtgtggggtgtggaggtgtgtggggtgtggaggtgtgtggggtgtggaggtgtgtggggtgtggaggtgtgtggggtgtggaggtgtgtggggtgtggaggtgtgtttggtgtggagctgtggggtgtggaggtgtggggggtgtggaggtgtgtggggtgtggaggtgtgtggggtgtggaggtgtgtggggtgtggaggtgtgtggggtgtggaggtgtgtggggtgtggaggtgtgtggggtgtggaggtgtgtggggtgtggaggtgtgtggggtgtggaggtgtgtggggtgtggaggtgtgtggggtgtggaggtgtgtttggttgtcgtgagctgtgggtatttagcaccacacagagcccaggatggccccagtgtccacagggccaaggaggagaaaccctgcctgggatgatcagcagatgtttcggaggcccccacaggcccagccctgtgttgacatccagagggtagtgtggcagcaagaaccgcccctggcttcagagccaggcctgggttcgaatcttggcgctgccacctctgagccgacagttcctcatttgtgacagagctcacacaccagcctagcaggggtgttttaaggatcagagttaaatatataatcacatgaccggcttggttcccggcaggtgattagtactaagtaaactgtggctaccgttggcgagaccgaagggaaaacatatctgtggctgacatgggttgagcgcccgcccagccagtgctttatgtcattatcctcccgacgtagagactgagggtcagagaggcatttggtgtttgccggtaaggcactggcagaggctgtttacaagtaaagcacaattgtcagttcctgccctggggatgctttcaggctgaagacagggaaagagaacctaaaatagaagggggggcctagtcagaggcgcttttgctgcgttggcgatgctggggaaagtttgatgaggaggagggagggggcagggctttgctgggagggggcaccgtaggggcagggcactccaccagccccagccaaggctggcgcttcctggcgagtgggtgtctttcacggcccccacatcggggcctggcctccatggagtcccctgcctcgcagctgtgtcctctgagtgtgtgtgtgcttgctcctcctcagaacatggtgatgagttttcgagtctccgaccttcagatgctcctgggtttcgtgggccggagtaagagtggactgaagcacgagctcgtcaccagggccctccagctggtgcagtttgactgtagccctgagctgttcaagaagatcaaggagctgtacgagacccgctacgccaagaagaactcggagcctgccccacagccgcaccggcccctggaccccctgaccatgcactccacctacgaccgggccggcgctgtgcccaggactccgctggcaggccccaatattgactaccccgtgctctacggaaagtacttaaacggactgggacggttgcccgccaagaccctcaagccagaagtccgcctggtgaagctgccgttctttaatatgctggatgagctgctgaagcccaccgaattaggtgagtggtcaccctggggaggctgcgactggaggcttcacctaggccccgtcgcccagcccagcccagccacacagccgacttcgagtgatgttctctgtggcgcagccagggcggggagccacagtggccaggggtgtccttcctcggaagcaaagggaccatctttgatattggtcaccccttgctgtgttacaagttaccccgaaatggagccactggaagcagggggcgtctgttagctctcaggaacctgtgagctgtgttgcggggcattggggcttgggggctctcatgaggctcagtcaggctggagccacctcatctggaggctcgaccagggctggagcaggcacatccttgtgtggtggctggcaggcctcagctcctcgccagctcttggccacagtccccaggtcctcatggtgcggactcctgcacggattgcctgggcgtcctcagcctggtggctccctcaccctagggtagcgagtgtgcacctccaagctgggagctggagccctttttataacccaacctcggacacgcctcgccatctcccccacagagtccgttgctcacacagactctgtggcgcatgcagggaccacaccaggctgtgactgccagggccaggggtgaccagggccacctgggagcctggtttccctgcttattccccttggaaagggggctggccagtggcatccttcccccgggctctggttcctcgctggcagcctgcaggagtgtccttggtcagtgggctcaggtcactgccaggctgtgtgcaccgggcgtgctgggggttcagggcgatcccaggcggaggagaggtgctgggctccacgcttctctctctcgtgtctttgtctgcaagcactgactgagcaggaactgtgtgtcaggacctcatagcccacagcagtgtggacaggcccctggtgcctccccagcagccgtggccattcaggctgcaggtgggcattgagcccagtctctgcctcagccatagccctgagctcagggccagggaggcctccgcagccccagcccccagggcagagagagtgtgcagcctctgggactcccagatagggagcggaacgtcctgggcctttgcggacctgtgccttgaggcgctcagatttcaccaagtcctctgtgtgcctggaggtctctccgtctcttcttcctgcctcccctcccctgcccccactctttccttcgcacagtaaacatcggagcgcctgctgggtgggtgcgtgatgggcaccaggcgtgggcacgcagcagggaacaggaccaaggccacgaggttcagaaccctgtgcatgccccctcccaccctgctgacccagcaacctgcctggcccctgctgtggcctgagggcccttctctggcacgcttcagtccattgggtgccagctggcccccgctcccctgcccagggaggcagcgttgatgggggtagggggaaggggaactggctgcttttcccctcccatctgcagccctgggacttagtgaggttaggctggaggggctgtgcttccaggtgaggatggaggaagtggaggagggaggaaggtgctgtcggtggttcctgcggcagccgaggctcctccctccagcctgaggctccgccttccaagtgaggctccgcctccaccttttttctcttgcaggaggtgtctagcagcagcctcctggggagcaggttggcccagtggcacctgtcctgggggactcagggtcttggcctgagttccatcggactgactttcccagcctttgctctctcatgagggaagctgttccccctgccaggttcttgggcagagctggctgtctctgaaggttgggccttgggaaggacctgcatcacagggaggctgggctttcctgggagcggcagggcaggcttggtccagggcgggggacggggctgaccagcttccttcctgcacggggaccagtagctccgtcccacaatacatcgctgtgccctgagccaccagggaccccggtcacctgatctccgggagagcctgctcccctgtctacaccagtgtgcctgtgctggcggctcagaacaaagaggccatccccaccctgcctctctctcccactggctctctctccatctcaggccgccaggtgaacctcctttcctggattccgtgctcttgggggactccctgggggccacctcggtcctcagaagtttcctggagcatagcccctggccccgaagcagtggtccccatggttttaggacctgagatgccatctgtccgccctgaccctgggctgtgtccctccccagggtgcactctgtggtgctggccttgcccgggggccgcctccggaggacccagttccaccggcttctccctcactccctcctctggctgtgacccaccgtccagcgtgaggcccaccgctctggtctgtttccccggaatagccgccggccggctccaggatggagaccgcgccaggcggacaggagccataaatcacgcggtgcggaatgctgggctgggggagggggtgacagagccacagagcaggctgcaggggcctcaggctgtaggtgatcggctccagtgggaggtgccgtgtgtggggacggggctggcacccagaacagtgcggagaacggcccaaggtcgcacagcggcctgccttccctcctcccgagccgactggctcctgctcctgagcagaggctctggcctggacctctgcaggctgggaaccctgtcctgcctgtcggcaaggaagccggcgccacccctttccagcctgcgccacctggggagtccggctagggagcctgaccctcctgtcagggtacttgggaagagaggctgtcaggaaatgtggggcagaaggaaggatacatgctggccgggcacagagctgctcctccagggtcttggcccgcagcgggcaccccgaggaatctgcctgcccacccgcctgctgtgcagagtggagcccctgtcaccacgactccagatgcccccagaggcagatagccctggtaccagccaagagccgccggtctggcatgtgctgtgctgtgtgtaggcacctgtgcccttcagcctctgaagcccttgggccagcattgcccaggccacagcaaggtagcgtggtccctgctcaggtgcagcacagaagtgccaggtgataagtctcatggcacacggagggctttcaggggcagctgtcagtagcaggagccatttactctacatttgtgaggaggtagcagtcaggaaggcctcctggaggcagcagcgtttcagtccagacccgagggtgactctcaagaagccaggcagagaggagggggcaggggagcgtattccaggcagagggcagtgagggcagaggccgatggccagagagggctcattcatggggctgaatggagttcattgtggccagaacatggtgcgcccaggaggagggacgcagtagcctgggcgcgggcggcagaggctggaacccgagaatggtgggcccggggaaggctgggggctaccctgcttgccccgagggcttcagcgcccctgaggttctggtatgatttttggggtcagtgaggaaactgaagtgcaggaggcaagtggccgtctgccttccacagccaggcctgctgcccgcccaggcccaccatctgtccgtctgcacactgggggcctggatgggcacggagcgtcctgtgtcactgtcccacatgtggggtagtctgacccactcagcccgctggcacttcccatacctgtggttggggaacagggggactccgccagctctgccccaggtcttggccttcaggttgaagaggagggatgggcccactgctaccagatggggggctgccagcagccacccccatgtcccgctagtccttctcccatcccctgtggccccctgccctgcccagcccagctccccaacctgcccgctggctgcagcctcctgctctgcttcctgcccactggtccccctcccatggcagcctgtgaatgttttcactgatgggtagagtggtcggcatcacccctgtgcctagccaggggcacctgttccccgcccctccaggacagtgccccctgtgtccctcatacctgactgtgctgcctctactcttgatctgggggacctgggttggggaatcagtgctggtagctcttagctggacagggtgggtccgggagttagagaacttgtatgtgccggggaggggacagcctggggagggggccagcacatgggccagctggagggggaatggtcccatccgatcagctttttttttttttttttttgagatggagtctgactgtcgcccgtgctggagtgcagtggcgcgatcttggcttactacagcctcctggcttcaagcgattctcctgcctcagcctcccaagtaactgagattacaggcacgcaccaccacacccagctaattttatgtacttttagtagagacgaggtttcaccatcttgaccaggctagtcttgaactcctgacttcaggtgatccacctaccttggcctcccaaagtgctggggttacaggcgtgagccactgcgcccagtctcattttttgtatttttaatggagacggggtttcgtcatgttgaccaggcttgtcttgaattcctaacctcaagtgatccacctgcctcggcctcccaaagtgctgggattataggcgtgagccaccaggcccggccccagtcagccttttaaaaactccctgtgtttcatttctatttaaacttgtacaattatgcgcttgtcctagaaaactggagtcaacagcagagcagtccggccggcgccctgctgcccgagtgggccgcctcggtacaccgggccggtgcttgccgccttctccctttgcatgtgtgattgtaggaatgtgtggctgtgtcctggctgctattttataaccaccccccatactgtgagcatctgctcacagcgttaaatattcatcgtcagcagcatctcgtgaggctccctggcagccttgggtggagccaacggctgggcccttcttgttgggctctcggatcgggcccaggggctgcttttcgtgcccgggccggagggcctggctgagcacctcaccccagaaccggctctgcctggcagggcccccgtggtcacctgatcttgcacctggccccaaaggtgcatctggttcagtggtgcccttgccttggtcccgtggccttggatgctgggcagcccacgaaaccatctcccccttggggaacttcatgcttcagtggcccaacaagaaggagcagcagagtgatgtagggaaactgagtcgctccttaggaggagaaggtttggagaaaagtgaggtggcggggggtgcggtttttaaatggggtgctcagcgaaggctttccttctggtgacatttgtacaaagacaaatatagggccatgaggctggtcgggggaggaaggttccagaagagggaatggcaggtgcggaggccctgatgcagcatggctggtggggcccaagcaggaggccagggtggtggccgtgtgtgcgccggggtgtgtgtggccctgagcaggggtactgagggtcaggggtctcctgcggagccatcccagggggcgggctctggctgctgagaccggcagagctgggggcagtcgtctgcaccgggcgggatttgaaaacagagctgacaggactggctgagggagtggatgtttgcaggacagcagagacgggggcttcatggatgccacctgggtttctggccccaaacagctgaccccgagggcagaagggcaggtttgagggagaccccacagccccttccccagcataggggggccgggtgtttggggggaaccgtcagcggcccggggccagtggcacagcagtgagagcacagggcacctcccaggcccccagcagagaagcacagcccggtctcccccagagggaggagccctcccagggcagggaccccagagtcttgttcttcaatgactgggccctgtctgccccaggcatgggctggcaacaatccctggccagctgggtggctcccttgctgcctgctggggacccacccttctcccctacctccttctgagacactgaggggtggggtgtctgtgttttcacctccgacccagcctggaagctcaaggcccagctcaggtgtaggctcccgtgcagcctccctgcccctgaaccattgctcccctggcactcagggcagacctgggcgcgtctgcaggtggcctgtgtgcccccctcccaattaggcggccttcctcaagggcccagccgggactccacagcccatcacctctgcagagactggctgtgccctgagcatataaacgggaaccggctgtggcagccccctcttcctgagggccagccacagacccggcaccggtccccgaagaaacaggtcaacatgggcgggacgtgcaggctgaggccacagaggccctggcagggctgggagccgagcccagggagtctggcttttttcttttttttttttttgaaatggagtctcgctgtcgcccgggctggagtgcagcggcaggatctcagctcactgcaagctccgcctcccaggttcacgccattctcctgcctcagcctcccgagtagctgggaccacaggcgcctgccaccacgcccggctaattttttgtatttttagtagagacggggtttcaccatgttagccaggatggtctctatctcctgacctcatgatccgactgcctcggcctcccaaagtgctgggattacaggcgtgagccactgcacccggcttctcgtgggttttaattgagaaagttccaagacagtgctggtagttgaggtgcgatcccatggctccggttcttgtaaaggccctgtcgtgggtgcaggccacaccactgtgtgcactgccgtcctgggagcacctgggagcacagacatagcctgcgaagctgatgagctccagcctttaccaggggcagttcgccatccctgttctaaagggcttgcctgtcatctcgttgtctcgtctcccggccactgcaaggctgccattgtggccagattctcgctcccccacgctcttccgatattttttacacttataaacaaataggtgtttactcagatgccttctctccattttcattacacaagtgatagcaggacgtgcacgctgctcagcgtttttgctttgtatctaaatatattttttaatgtagacacagtcttgctatgttgcccaggctggtctcgaacttctgagcccaagcagtcctctcacctcagcctcctgagtagcgggaatgacagctgcacaccagcacacctggctcaggcttatttaaaaactttttttagagacaaggtctcactgtgttgcctgggctgggctccaactcctgtgctacagcgatcctcccaccttggcctcctgaagggttggggttacaggcatgagccgctgtgcccagcctgcaagtttctttgaacgcatgtttccatgtattgagggaaaatactttggagtgggattcctgattcctgggtgatagggtaggtctgtgcttacctttataagggtagtttcccagagtgatggtactgtcttataaccccaccagcagagagttctgattgctctacacctttgccatctcttagagttgccagtcctttcattttagccatgctagtgggtgtgtagagaggtattttattttattttacctcattttatattattgatacagagcctcactctgtcacccaggctggagtgcagttacacaatctcggctcactgcaacctccgccttctgggtttaagcgattctcctcagcctcccgagtagctgggattagaggcgtgtgtcaccatgcctggctaatttttgtatttttagtagagatggggttaccatattgtccaggctggtcttgaactcctgacctcaagtgatccacctgcctcgcctccacagtgctgggattccaggcatgagccaccgcacctggcctgggtgtgtagagaggatttaaaccggtcttggatttctacacaaatcgcaggggcctgaaatactggctgatattttgtggaggattttacatctgtgttcatgaggggtattcatcgggaattttccttccttgatgctgagttgtgaggttttggtatcagagttatgctggccttgtaaaataagaagtatgctttccttctctgttttttgaaagagtttatgtacggtttatgtggtttctttccaaaatgttttatagaattcaccgatatggacctgcattttctttttctttttttttttttttttttttgagatggggtctgattctgttgcccaggctggagtgcagtggtacgatcatggctcactgcagcctccacttcctgggttcaagcaatcctcctgcctcagcctccaaagtagctgggactacaggtggtgtgcacctccacacctggctaatttaaaaattttttgtagagacaaggtctcactttgttgcccaggctggcctcaaactcctgggctcaagcaatccacccacctcagcccccaaagtgctgggattacaggcatgagccaccatgcccaatctggacctgcagttttcagaaaaggttttaattatggatccaacttccttaacaggtaaagagcttttcaaacttcctgtatcttttggtacccgttttggtaatttgcatctttgggaggatttgtccatgtcactaagttgtcagattcattggcataaagtttcaccttttattcccctattgaaccgaaaagctgtagggtctgtactattgttctttcatttctgatattggtagtttgtgttctcactgtctttttgttgttcagctagagttttgttttttttgttgttgttgttgtttttggtggttttttttgagacagagtctcgctctgtagcccaggctggagtgcagtggcacgatcttggctcactgcaagcttcgcctccctgcaagctccgcctcccaggttcgcgccattctcctgcctcagcctccctagtagctgggactgcaggcgcctgccactacacccagctaattttttgtatttttagtagagatggggtttcaccgtgttagccaggatggtctcgatctcctgacctcgtgatccacccccctcggcctcccaaaatgctgggattacaggcgtgagccaccgcgcctggccgtttgtttttgtttttgtttttttgggtttttttggaaacagtctcactctgtcgcccaggcagtggtgtgatctccactcactgcaacctttgcctctcagcttcagacaattctcctgcctcagcctcccaagtagctgggattacaggcgcccgaaccaggcctggctattttttttttttttgagacaccacaccctgctgtttttttaagagatgcggcagccaggcgccgtagctcatgcctgtaattccagcacattgggaggccgaggtgggcagatcacctgaggtcgggagttcgagagcagcctggccaacatggagaaaccctacctctactaaaaatagaaaattagccgggcgtggtggctcatgcctgtaatcccagctgttttgggaggctgaggcaggaggatcacttgaacccaggaggtggaggttgcagtgagctgagattgtgctattgcagtccagcctgggcaacaagagtgaaacaaagtctcaaaaaaaaaaaaaaaaatggggctggctgggcacagtggctcacgcctgtaatcccagcattttgagagtttgagatgggcggatcacctgaggtcacgagttcgaaaccagcctggccaacatggcgaaatcccatctctactaaaaatacaaaaattagccaggcttggtggctattcgggaggttgaggcaggagaatcgcttaaacccgggagacggaggttgcagtcagccgagatcgtgccattgcactccagcctgggcgacagggtaaaactccatctccaaaacaaaacaaaacaaaacaaaacaaacaaaaaccaatgttttctgactgcgcctctgcctgtcagtccagttgtaagtaagagggtagggcccaggcttgtgagcaccatggccttcatcccgtcagtaccccccgcaccacctctgtccgggtgacgtggccaccctgcaggcaggaggagagcaagggccgggtccggtttgtgctcaggagagaggaggtatggcagtgtcctgctggcctggctgggtccagctctccccgccaggcagctcggcacttttcggtttcctaagtagacgcctgcatcccacaggctgcgaaggtcacccagcaatctgagtggccgtcaacaggacacaggccatggtgagcggccccgagaaggggatgggcgggagtcctccctcatcctccttcctgggcggcccccacctctgccccacatatctgtccagccaacttcccatttcctgtttcctggtctgaagaggcgcaggctgggaaaagcgactgggctcgggggacctgccagggaccagacatgcccctgaccccgtgtttgtcttcagtcccacagaacaacgagaagcttcaggagagcccgtgcatcttcgcattgacgccaagacaggtggagttgatccggaactccaggtgtgcggcacctcccccagcccagcaccccaccgcccgcccacccactttctcctgggctcactggggagagccggcagccacgtccactgcaggcctcgctcgggctcagtccagaaccgtgctgcaaggcagtggccgggtttgcttccttccagaaaaccccatcctgggtctcaggtgctggcctgtgtgcccactgcctgtgccctgcagcctgctagagagaggcggactgactgtgcccttttaacacggtcttgccctcctgggcccatcctgggcattgcagggagcggaggagcattcctcgcctccacccacgccatgacaagaacacacccctgttgtgacaaccacagatgtccccagacattgtccagtgtcccctagggcaggataacccgggcgagacctccctgggttaggggattccacgtatccccaagagactctgtgtcccatgatcctctgccctgctgaggtcccagaaggctgcatacattgaaatccacaccctgaattggagggggagaaagtaggtgaatcccaggagctgggggtccccggtttacaccgcccgccttaggaatttattctggtgtccagcatgagcaggaagttaagtcaggtgtttttttgttttttttttttgagactgagtgtagctcttgttatccaggcttccaggctggagtgcagtggcgcgattttggcttcctgcaacctccacctgctggattcaagcaattctcctgcctcagcctcccaagtagctgggattacaggcgctcactaccacgcccggctaatcttgtatttttagtagagatagggttttgccatgttgatcaggctggtctcgaattcctgactcaggtgattcacccacctcagcctcccagaatgctgggattacaggcgtgagccactgcgcctggcggaagtcaggttttttcccagttatataatgaatacggggtttccccctccataccgtggatagtgaggtgggatggttccctcggtggggccgtcctgggcactgcaggctgctgagcagcatccctggcctccacctgctctgtgccaggaacacccctaactctgacaaccacagatgtccccagacacagctcggtgtcgcctggggcagggtcgtcctcagatgaggacggttgaactgtggcaggtgaggggccagtgtggctgccctgcgctctgctcctccctcagtctctccgaggctgtactgcctccagctgagacagattcctgctgggcaggctaatggtaggtgctgggcccttaggacaggggaggccatttgcccaggtcacccctgagtccatggcagggctgggccgggcgcccccatttaatgcctagcttctcgtgcccagccgcttcagacccaccgcccccacctgctgtggggccaggttcctggggcctcccagcctggccctcacacctagtaagggttcagatccagccgagccaggcttggccatggaggcctctctgcctgggtgacccaaggtggcgacctcgtctttctcagcctcgtcttccttgtctatgtacctgggtcagcacagcctccacctgcactgggtccctgctgcagagtgctcagagccagccacacagtataaaaaaatcagtttgggctgggcacggtggctcacaactgtaatcgcagccctttgggaggccaaggcaggtggatcacgaggtcagaagatcgagaccatcttggctaacacagtgaaaccccgtctctaccaaacatacaaaaaaattagccgggtgtggtgacgggcgcctgtagtcccagctactcgggaggctgaggcaggagaatggcgtgaacccgggaggcggagcttgcagtgagccgagatcctgccactgcactccagcctgggcaacaaagggagactccgtctcaaaaaaaaaaaaaaaaaaaagtttggttttctcctcagaaagcttctggacatttctttttctttttcttttttttttttgaaatgaagtcgctctgtcgccaggctggagtgcagtggcgtgatgtcggctcactgcaacttctgcctcccaggttcaagcgattctcctgactcagcctcccgagtagctgggactacaggtgcgcaccaccacgcctggctaatttttgtatttttagtagagacagggtttcaccatgttggccaagatgatctcaatctcttgacctcgtgatccaccccacatctgcctcccaaagtgctgggattacaggcgtgagccaccctgcccatcccacatttctttttcttatgtcgagatatgatttgcataccatagaatatacagtttttaagggtgtcatcgagtgggttctcgtggatcagtaggtatcgcagctcccaccactgcctagtctcagggcagtcatgtccatccccagcagctgccacccttcatccactggcccccacgcatcccctcctgtctgtaaatgggtctgtcctggacatttcatagaagtggaatcacatactatgtggctttcgtttattattattatttaagacagaatctcactctgtcgcccaggctggagtgcagtgtcgcgatctcagttcactgcaatctccgcctcccaggttcaagtgattctcttgccccagacttctgactagctaggattacaggcgtgcaccaccacactcagctaatatttgtattttttttgagacagagtcacactccgaggcccaggctggagtgcagtggcacgatcttggctcactgcaagctctgcctcctgggttcacgccattctcctgcctcagcctcccaagtagctgggactacaggcacccgccaccacgcctggctgatttttttttttgtatttttagtagagacggggtttcaccatgatagccaggagggtctcgatctcctgaccttgttatccgcccgcctcggcctcccaaagtgctgggattacaggcgtgagccactgcacctggcctaatttttgtatttttagtagagacgaggtttcaccatattgcccaggcttgtctcgaactcctgacctcaagtgacccacccacctccgcctcccaaagtgccagggttactggcgtgagccacctgccttgtgtgtcctttcgtgtctggcgtctctcactgggtgggacatcctcacggtgcacctgtgctgaggcctgggtctgagcctggctcctttccatggctgggtcgcgtcccgtgcgtgttggtccttcggtctacggaaggacactcaggatgctgctagtttgtggctgttgtggtcagttctgctgtgaacatccacggatgcgtctttgggtagatagactttttcctcttcttctgggggcgtttcttgttaaagtttatcctcaggtgttactggtttttgtttttttttttttggagagtgtttctctttgttacccaggctggagtgcagtggtgcaatcatagcttgcagcctgtgcctccatgggttcagacgatccccctgcctcagcctccaagcagctgggaccacaggtgtgcaccaccacgcctgggtaattttttgtggagacagtttcaccatgttgcgcaggctcgtctcaaattcctgggctcaagagctccgccagccttgacctcccaaactgggtgttttcttgccattgtgagccagctgctagattcccgcatgcacgttttagctatgtttcttcgcagggagaggcacctggctgccctctctggttcagggttttgctgtggattctgttgcattttccagggaggccagcccctctcctgacctcacagccactcctctcacccagcccgtacaaaagagtcctgggcctcagtttcccagctctgggggagggagccttgtggtgtggcggtctccaccttgtcgggtgggctggggtcacgccctcctcactcagctctcctttcctttcctctggtttgctccacacccacagggaactgcagcccggagttaaagccgtgcaggtcgtcctgaggtatgcccaggtgtgcccgcgaccccagggctggacccccagccacccgcccctccccgccccccagtcctggcccaggcccttctcagtctcccctgctaacagcagagcccagctctcctcacctgctgtctatccctgtctggggatacatcaccatccgacccccactcaggccacacccgggggccctgataccccccgtgtcacattctccggtgcccccatcactgccgcctggctaccactcgtgtacccccgcagcagcctagtccctcctgtgcgccccctccccgccccatggtccctgttgtcgttgcagaatctgttactcagacaccagctgccctcaggaggaccagtacccgcccaacatcgctgtgaaggtcaaccacagctactgctccgtcccggtgagcatgccccgcccccgcgtcggctgcacgggtttggggggcgtggagggagggtgggggccgtcggatttcccagccgctcttggctcgaggctgagcggcccatctgcttgcagggctactacccctccaataagcccggggtggagcccaagaggccgtgccgccccatcaacctcacccacctcatgtacctgtcctcggccaccaaccgcatcactgtcacctgggggaactacggcaaggtgagtgcgtgcccgggtgcccaccctgccccccaaccccggccccgtcctgccagccctgaccccttccttctgtccccagagctactcggtggccctgtacctggtgcggcagctgacctcatcggagctgctgcagaggctgaagaccattggggtaaagcacccggagctgtgcaaggcactgggtgagcagctcaggccacctcggccgaggggtgccaagtccaccctggaaacccgccctgtgctgggtgaagcggggggccctgcacccggaggagatcgatcaggggccgcctgtcactctgggggtccatggccccccggctgtggctggggaggtctctggaggatacggatggcagagggggcacttggcagtgggagctgctgtgcggaggcctgtggggtcacacctcgtgttgctggccccaggtgctccagcccacaggggtctaagcagcagaagagctggagcctcattccgggacagcacagaggccgggaggggtgagaggagcacagagggagctgtggtctaagcagccccttctcgttgcctcagcggggccgagggtgctgcgggacctggcgggtcacggacggccagggtcgtggaggcagttgctgtgggaggaagacgggcggcggcggtctgacctcacgttggtgaggccccgtttaatcttttttctttttctttttcttttttttttagagagtcagggtctctgggaggtagaggttgcagtgagctgagactgcatcgctgcactccagcctgggctgcagagcgagactccacctcaaaaaaaaaagtgtctcggtgtatcgcccaggctacagtgcagtggtgggatcgtggctcactgtagcctctaactcgggctcaagccatcctcctgcctcagcctcctgagtagcttgggaccacatgtgttcaccaccacacccaactaatttttttttttttttttttttttttttttgagacagagtctcactctgttgcccaggctggagtgcaatggcacgatctcggctcactgaaacctctacctcctgggttcaagcgattcttctgcctcagcctcctgagtagctgggactacaggcatgtgccaccatgcccggctaattttttgtattttcagtagagacggggtttcaccttgttagccaggatggtcttaagctcctgacctcgtgatccgcttgcctcggcctcccaaagtgctgggattacaggcgtgagccaccacgcccggccccaactaattttttaatgtttcgtagagatggaatcttgctgtgttgcccaggctggtcgtaaactcctgagctcaagcagtgcacctgcctcaatctcccaaagtgctgggattacagtcttggccactttcgcacctggtctcttttgtccttgtaacaatgaaaacaattttttttaagtgacacgcagagcaattttaaaagaaagcctgccggcaaggcgcagtggctcacacctgtaatcccagcactttgggaggccgaggcgggcagatcatggggtcaggagagcaacaccatcctggctaatatggtgaaaccccatctctactaaaaatacaaaaaattagccaggcgtggtggcaggcacctgtagtcccagctactcgggaggctgaggcaggagaatggcgtgaacccaggaggcagagcttgcagtgagcggagatcgtgccactgcactccagcctgggtgagagtgtgagactccatctcaaaaaaaaaaaaaagcctgccaagcctggtaggcaaatcagtcctcaccccaagcagccacgcagcacaaagccagcgtacagcagttagccctgcctggcggctgtgtggcctcagaaagtcgctggccttctctggtggccactgtcttcaggagaatagatctgagccatcttgagggcacctggacatctctctggaccccacatgcttggggcccaggcctcagtgggctctgcaggcctgtcttatggagaggctaggcctaacctggagtcatttggagctgggagtgggagtcaggcaggtgggtgaggactgggaccacctgccaggctgacgagagggcggttctgggccagccgggtttgctcgcacccccttcccgaatggtggctgttttcaggtggaatctgggcaccaccccagccccttggcagaatgtgggccagagggtcttccagctgcccctcctagctgcccaggcccctgtgcccaggccagagagttccccatgagcactgccctcctggcacagccaggcccaggcctctggtccctgttcctgaccaccaaagggcacctccttgcctgggtgtccagaagcctggagcagtgctggcactgccaggggcctgcgagccccatcgtgttgaagcctcctgtgcactccagccccccaagtcaggaaagatagccggcagcaccccctctgcagagcaggacgtggagggtgaggggtccctccacggagtccggcatccttggccagcctcctccaggctcggggatggagggcctggctatgtacccgtgtgaccagtggggacactgaggcacagagtggcaaagttagggttctgtgtcctgggttaccccgccccacctccctcttccctcaaagggcccttttttcaaccgcccccgaccttccctgcctgtggggacatggccaacttgagggaggaggctggggccgggcaggcctcttctaggcccacggggtgggggccgggcttaactcctcagtgaccagagcccgcagtgctgggggctgtggggtcaggcttcctctccgaaggggtctcctgctgcttcccacagccggccccaggctcagcctctctgtcactggatttctttcttgctgcacctaggaagtcctcacctttgcctcacttgaacccttcctgctgcgcacgtctctccatacacaaaggagggagagtttgctttaaaatcagatgggcacctgcatcccctcctagctgcccctttgccaggcttgagggtccacccgggcaccgggtagccagagctgggatccaaggatggaaactcagctgaggagtgagcggctggggcagccttggctcaagcaggggagctgctgggagccagcacgtggctgccaccacgtccccacgggagaaggaagagcccactgctccacaccccggctgggggtctgggtgggggtcaggaaggaggaagtggctcccaagcgggcagagataagtggtgtttcaggccaataaggggtggtaggggcatttccaggcggaggaacgtcaggacagctggggggagtgggggggcaggctggcaccatcactctggaccccaagtcacttgggcaggtggcttcctggaggaagcaacactggtccaccaggcagctgagggccaggtggtggatggagaggccctgtgggttgtgggccagggtggcctgccccccatggcccagggctggggtctctcctgagctacccatggatggagtttaccctgggatggagccacatcccagaagcctcaggagggcagccagggtccctgcgtgagtttccttctggctgtgggcctgctgcccgtcgaggggagggcggcgcctgcctccaagacttcatgtttcacatatgtttccccatgttccgtgcagcttgctggcgggcaccgtcttttcctttaaagaagcagctacactcctgtctgcaggctgccttggggcggtgctggggctgggcggcagccgcttgctggctcacagccaggaagccccaggatccgtctcccaaagagtccctgcctcattccccgctgtggccttggggatggtgcttcggtgacagaatgaagtcacagcaatgactctttcggtggctgtgttgcatgaaacttgccagaaaagtcccatgggtcatagtccacgcagggtgggggaggccacataggccacctccgtgtgggggcttcggctgggtctgtgctgtgcccaggttgtggtcaaatctaatggtggttgccacccggctttctccaatccctcacggccccgagccacacagcgaagcttgggactcatcgtcaggggcctgttctgggaggtggacgtcagtgccggagagaactcgaatcacagccccgcgccctgctgttcccaccctcctgacggtgtcttccgttccctccccacagtcaaggagaagctgcgccttgatcctgacagcgagatcgccaccaccggtgtgcgggtgtccctcatctgtccggtgagtcggggcgcggtcccctcctcgaggcctctcctgcggccggccttcccccctggcggccctgggcccggggcggcttggctgggccgtgagcctgcgggggcgaggctggtcttcgtcccctccgtgttcctgaggcatgagtgattggagcgagccacaggatggagctgggggtgaggggcaccgggcaggcgggcacaacaggaggggtgccctgctcacgcagcccctcccccacagctggtgaagatgcggctctccgtgccctgccgggcagagacctgtgcccacctgcagtgcttcgacgccgtcttctacctgcagatgaacgagaagaagcccacctggatgtgccccgtgtgcgacaagccagccccctacgaccagctcatcatcgacgggtgagcccggggccccggggagggcggccggagccggacatccgtggaggtctcggtggcaccccgcttcctgcagaccacatggtgccccagcaagacacagcagtgggggcacatggtcctggagctttggaaaccccgggctgcgaaaagagccggtttctttctcgcggaacttctcagagcctttgctatgcaggtgacagccacgtagcttaggttgcagaaggtgggctccggtccaccccgctcccacgtgacctcaggcaagtgtgaccctgagctccaggagtgtggtttgtgccacaaaaaactgagccaggtcgtgctttcacacggcgttcaccccaggacgcgcagccttgggggtgacctcctcacagaaaggcaaaggaggtggcgcctcctggagcactctggctacgccatgcccttcccttcctaggtggcacagctgtggccaggcattccccaggccacaggggacaggaggacaagacctttctccctggtggaaggctctgcccagggcttaagtttccagaaactgagccccgttgtctgtggtgcctgatgcggctcctgcccggcgccgaccgcgcccacctcgtccccagagccgccggcagggcgcgaggccacagcggcacaagctggcgccctcacaggcgggagcaggccctgcctgtgggggtgggccgggtccccagccctcaggcatggcctcagcggactgtgcaggtgaaggcagggctggcctgcctctggggttgtagatttcatccccaggtggacctccggttcatgcacttgtccccatcccaggagacagacctgtgagcgtcctcagtttacagacgaggaaacaggctcagaggaggcaaccagcagctggagctaccccggctcacggggccaggctgagacttgaacccagcctgagtctgggtcccctctgtggagggctgggtggccacccccttgcatcccagcttcgggtagagagaggagtcctttgggccgggcacgtgggctgcctgaatggctgctctgttcccagcctgacagctgtgcagccgggtgcccgccttcccccacaggcccggagtggggcttgggcttggggtggcggcagctctcacagctccagggccaccagggctggggcaggcagctgtgtcccatgcaggccttggcctcagcagcccatgggactcggtgtagccagggaggcttcctggaggaggggtccttggttcatactttgttccatgagccctatcacctctctgtccctggctctgagctgggtgaccccagggtccccaaaagagccccgtcccagaccctgccttcagagtcttgttcttggccaggggagcggatagaggagcagagccagacataaacgttcccgttgctgtgtgtgtcttggggaggaggaagagaagctgtggggtggggctttggagggtgaaaagcagttttgcaagcagggaagtgggcaggcagggctgtgctacgcctggggcggccctggcacggtgggctccgagcatcgcctcagagagagctcggcggggcggaggggctggcctgggtgagagcctcagaaagggtggcccagagtgggacgagggctctcctgtgtgatgagaacgatgccactgcgggtgcctgggagcagctgtagccttgacagtaacaggccagcctgggccctgcatggacccgtggggcagggggcctctcctcagacgccccccagccactgcacctttcccttcctgcgggtggggagactgaggccctttggctaagacgggttggggagcagaaccagggcctgcctccagttggccttgtggcctcagggaactcgttcccttcccgagcctctgtttctgcatttgtaaaatggggctggtaggacctccgagtaaaaaggccggacacagtgggggtgctctggagaggctgtggctggcatgggcgtggggagcccgcactctgctcccattgctaccctcacagcctctgcaggggctttgagcagccagcaccttcactccagcctgtttcctgatctggcgggcacacagtgcaatgtgaaagcaggtgtgcgtgcacacccacacccgcatgcccacacatccatacagtccacaccatcacacacacacacccacacacatccatacagtccataccatcacacacacccgcacacatccatacagtccacaccatcacacacacacccgcacacatccatacagtccacaccgtctcacacacacacccgcacacatccatacagtccacaccgtctcacacacacacctgcacacatccatacagtccacaccataacacacacatacagtccacaccgtcatacacacacacacacatctgtacagtccacaccttcacacatccatacagtccacaccgtcatacacacacacatctatacagtccacactgtcacacatccgtacagtccacaccgtcatacaaacacacacacatctatacagtccacaccgtcacacatccgtacagtccacaccgtcatacaaacacacacacatctatacagtccacaccgtcacacatccatacagtccacactgtcatacacacacacatctatacagtccacaccatcacatgcacacacatctatatggtctacaccgtcacacacacacacatctatacagtccacacctgttacatgcacacatctatacagtccacaccgtcacacatctatacagtccacaccgtcatacacacacacgtctatacagtccacactgtcacacatccgtacagtccacactgtcatacaaacacacacacatctatacggtccacaccgtcacacatccatacagtccacaccgtcatacaaacacacacacatctatacagtccacacctgttacatgcacacatctatacagtccacaccgtcacacatccatacagtccacaccgtcatacacacacacatctatacagtccacaccgtctcacatctatacagtccacactgtcatacacacacatctatacagtccacaccgtcacacatccatatagtccacaccatcatacacacacacatctctacagtccacaccatcacatgcacacacacatctatatggtctacaccgtcacacacacacacacatctatacagtccacaccgtcacatatctgtacagtccacaccgtcacacacacacgcccacacccgcatgccacacatccatacagtccacattcacgtatgcccatatgcatccattcacacgtgtgtacacatgctcacacacacacattcatagactccacacatgcacacgtgcacacacacgcacatgctcgcacacatgcacagatacactcacgtccacacacgctcaaacatgcgtgcacacccggaggtgcccagaggggcagggtggggaggacccctgcagctgccacactccctgctcttgtgggtagttgggggccactgggtatgtgtgtccatgccccgtccccccggcagtgccgtgcactgcagacctgcctggggctcagcacctgcaggggcctgagggcgggggagggaatgcggggtccctggacccctgcggtcggggtggtgaggctgctcttgcagagagaagtggggagtgcctggctgcatccgggagggatggagggctggggagttgggggggtggggcacctccagccccggcgtcagctgtccgcctcgccccaggctcctctcgaagatcctgagcgagtgtgaggacgccgacgagatcgagtacctggtggacggctcgtggtgcccgatccgcgccgaaaaggagcgcagctgcagcccgcagggcgccatcctcgtgctgggtgagtgcctcaccccaccagccgcgcagtccgcagccagggccgcctcagtttccccatttatcagtggttgcatcctaagtacctgcaccctgtccctgttgcccgtaggcccctcggacgccaatgggctcctgcccgcccccagcgtcaacgggagcggtgccctgggcagcacgggtggcggcggcccggtgggcagcatggagaatgggaagccgggcgccgatgtggtggacctcacgctggacagctcatcgtcctcggaggatgaggaggaggaggaagaggaggaggaagacgaggacgaagaggggccccggcccaagcgccgctgccccttccagaagggcctggtgccggcctgctgaccccggccgcacactcgactttcctggtgctcaccacgcagaggggcacgggccagcctcgggcgcagagggaggagtgacctttctttttctttttattgtcgttcgttttgtttttccacccttttgcctggctcctggcacctgtacctctggactctcctatcgggggattaaaaaaaaaagtaaaatgacaaaaaaagatacaaaaaagaaaaatgaaacaaaaaagtcaaactcttaaaaacaaggccggccacccacacagccgcctccccggctggagtccgagccgggaaggggtagtgggcgggagggaccaggacgccgccccgcgccctcccctccggatgccccgccgcccgccgccctctgcccacgaccattccagccagtgcgcggggacccgggcggcgggcggtggggcgcagcccctctctggcgaccactttgacgtttgtctcttcctttgctttttctctgcaaatgcatcctcgcccagagaccctcacgcgccgagcagcgagcgttttagccgagaagccatggagtgggttggggcggggaggggcagtagggtggggggatgggtgggcaggatgggggtacagtgggcggctggggagggtttagccacagatgtgttgtattttttgaaagtgcaataatttggtattttgaagacccggcgtgtggtcaggaacccccggggaaggcgggggcccagggtgcggcaccgtgtggcgtgggggggtctcagttttctagccagctacctcggtaattccaattcaggttaacttccctacggaacagcacagatgtccacagatgtccacagctgccgccgccgccgccgccaccataccccggtccttggggcatgggttgcggtcgcttcccaaggggcagcagggaccccggccaccccggctctcggtttgggttgattcctctcctttttgctcttggttttccgacgggtacgaggctggcccggcaccctgtcccccgggagcctcactcttccagcaggaccagaccaggggcctccttcctgtccccaggcgttcccggcccctcgcaggccccacccatgcccttggcctcagggtccaacaactgggggagctaccagggctctgccttcaggagcccacagctgggcaccccccttgccccgcaggagaccggggcgcaggcggggcaccggcctcacctggttctccaacaccgctgcctgcggtctgttttgcttttgtcctccccagcccagaattttcctttgtataaacagaactcctagtcaggaagcaatatcatttcaggtctaaagaaagggacgtgcatctggccgagggcagttcagtctcactgcagagcccgcagcccgctgcgcagctcggcccctcccgcccgcacgggcagctgaaggccgctgttttctaatatttgtattctaatttaattgtttttaaaaaatgcaaataaaaaaggtcgaggtgaagccatccaggcgtccgcttttctgtgccctgtgtctcttaagtgtgtaccctgtagtcggggggcggagttgggggaaggacagaaactcagcctcacccacatctctctttcttggttattgcctcagcttcagaattcaaaaggtgctgctcgtggtcaaatgaggcagatttttatttatttacttatttttaatagagacagggagtcttgctgtgttgcccaagctggtcttgaactctgggcctcaagtgatcctcctgcctcagcctcccaaagtgctaggattacaggcatgagccaccatgcccgacctgaatgaggccagttttactgtgtactgtactgcctgggcctggtgtccaccacgctgggagaatgggagaagggacttgggctgtacatggaattcaggtcccaggatcgtccatgtctctgggtggccaagacgatacacaaatgttttgcttttgtaaggtgaaaaaaaagggccgggtgcagtggctcacgcttgtaatcccagcactttgggaggccgaggcgggtggatcacctgaggtcaggagatcgagaccatcctggctaacacagtgaaaccccatctctactaaaaatacaaaaagctgggcgtggtggcgggcgcctgtagtcccagctactcgggaggctgaggcaggagaattgcttgaacccaggaggcggaggttgcagtgagctgagatcacgccactgcactccagcctgggcgacagagcgagactccgtctcaaaaaaatatatatacagacaaccaatgagcacatgaagagatgttagggatgtgagtcaaatgcacggtgagatacctgtcacccccaccaggacagctagcatcaaaaacagcagcgagggtcagggaagctgcagtccacatggctggggaagataacgtggtgcagccccttggaaacagttgaggctaaatgtggagttagcgtgggacctgcaatgccagccctagacgtgtccccaaggtaagtgaacacgtccgtccacacaaatgtgctcacggacgtgcacagcagccaaatgtggcaatgacccatgtccagccggggagtgaatcagtgcagtgtggccatccacactgcagaatgacagccatggaaaggagcgaggctctaacacaggcccccagcccagacgaactctgaggatgccatgcttagtgagagacatcagacaccaaaggccacgaggcgtgtgatcccatttctgtgaaatgtccagaacaggccaatccacagagacaggaaggggattcacgggtgctggagagtggagaaggggattgagagtgatcacaaatggatatggggcatcctttgggctggatagaatgttctggaattagtggtgacaggtgcataatttttttaagggaattttttgtttgtttgtttgagacagtctcgctctgtcgcccaggctggagtgcagtggcgtgatctcagctcactgcaagctctgcctcccgggttcacgccattctcctgcctcagcctcccaagtagctgggactacaggcgcccgccaccacgcccggctaattttttgtgtttttaggagagacgggggtttcaccgtgttagccaggatggtctcaatctcctgacctcctgatctgcccacctcggcctcccaaagtgttgggattacaggcatgagccaccgtgcccagcctttttttttttttttttcttttgacatggagtcttgccctgttgcccaggctggagtgcagtggcaccatctcggcttactgcaaccttcacctccccccaggtttaagtgattctcctgctacagcttcctgagtagctgggactataggcgtgcaccaccacgcccagctaatttttgtatttttactagtcaccatgttggccaggatggtctcaatctcttgacctcgtgatccacctgccttggcctcccaaaatgctgggagcattacaggcatgagctgccgcacctggctttgaagagcaattatatggtgtgtgaattacatttattttcatttctgagaaagggtctcactctgtcacccaggctggagtgcagtggtgcaatcatagctcacggcagcctcgacctcctgggctcaagcaatacttccacctcagcctccagagtagctgggaccacaggtgtgcaccatcacactcggctaatttttgtatttcttgcatagacgtggcttcaccttgtttttctggctggtcttgaactcctgggcttaagtgatcctcccttcttggcctcccaaagtgctgggatttcaggcatgagccaccgcgcctggccttgaagggaaattgtatggtatgtgaattatatttttgtatttttatttttgagacagggtctcactctatcgcccaggctggagtgcagtggtgtaatcatagctcactgcagcctcgacctcctgggctcaagcaatccttctgcctcagcctccagagtagctgagaccacaggcgtgcaccaccacacctggctaatttttgtattttttgcagagacgtggtttcaccttgtttttctggctggtctcgaactcctgggctcaagcaatcctccctcctcagcctcccaatgtgctgggattacaggcatgagccaccactcccggccctctctgaagcacagaggttaggaagcacctaaccctggcttgtggtcctgaggctgcggctccttcagcttccccatgtgggacctctgagcagaggcctcagtgtgccctgagggtccacggtgcagggggctcaggacacggctgtagaaccgctgacccccaaccctgctccagcgcgtgtcggggacttgggcacgaatcctggctgcagcaggttcatgggtggcctcgcacaggtatggtgctttagcatggggtccacacaaggacccggaggccctcagacttcgtggtgtggcctctgtggtgtttcctggcaagggctgggccaggctttgttgacttcctgtggctactaggaagagcccaatccacagaggaggagctggggttctgagtggacccagtgcccggctcagtgcagccattgctgcctcactgtgccatctgcttccatgagtgcctcatccatcccttggggctggccccatccccacctttgctggcctggacagattccttggacatgggccgagtctggttggaggacaggaggaaggaggaggccctccctcagagaccctacccagaggtaggggctgcagctagctgaggcttccggctccagatcctggctcatgtccctggggcctggcatggggcagcaccctggggtcctctagcagagtcaggtggcccccaggtgaggctaccccgcctggggcctcgggaaagcctggagccagtggtgcccagggcccagccctggattctgctgacaactcgcccggccggttctccctgctgcccctctggccttatcctgtgccagctgcctgcccgcgccaggggctatgggtcaccttccccgcaagaggggcctctggacctgggtactcctcggacactcacccccaccccggtgctctgggtcaccatccacacccagcctctctgccacgcgacagacggaccccagagagatgggcctggcttccaaggccgggcaggaagagcaggaagggtcggggacctggggcttctctccttgggacccaggatccggtcaccctgggcccaaaggtgtggtgtggacgaggtgctcaacccacccagtctcttcagggccaaaaggggaaaagggggaccccccccaagccccccatccccgctccccagcctcccccgaacaaaacacagagaacatcaaatgaggcgactgaggcggcagcggtcgtaacaggctgcgtttagtggttctttttttttttttatgtacaagaaaaatgaatttttttgttttttcatcttttgtgtttttgtttgttttttattacttttaaagcttctccctccccactcccaaaaagtgcatttttatcagttttttttttttttaaatctcccacactttataaagactctcaatacagtctctggaatgtctatctgtctgtgctctgtaccctgagggcgccgccccgccccccattcaccaggcctggcccctccaaagtccaaggcacctcgattctgggcctggggtggggtggggggcgggacctgggcatcggatcctggtccacagcctccaggcagccccggcgagggatgggggtctccctggccccctccaccccctgggcccggccccccccccccccccccgtaaatctatgtatttaatgcgagctagtcttaactctgaggttgtagctcctggggcacccccagcctccaggcccctgacccgtcctgcgccagccacccaccacccccccccccccacctccaggaaggctgcttcaacttaaataactttttaaaataaaactgcaaatataaatatctttctttctcaaaaaataggatttttgctttttttgttggtttttaatatttttttttcttctgtttttcctttcattctctctgtcttgcctccaaccattctggttgccgggcgggagggggcaccccgaggcccctgcctcagtgtcaccacctgtgaggtgaccgctcctgccacggccccggggtctgaatcgtgcaaagacccctgtcccccaccttccctgcagccgcccacttccaggggaagaccctggaagaggctgggggacccccctcggaaggaagcaaaaagacagtgacaggactgcatggccacaatggtgggggggcagactttggtatcgcccgctcgagcctgcctggctgcaggtccacacccatgccaggccgggcctgctccggcattttacattcactggtttataatttttttttttcatttttaaaaacttttttgactttttttttttttccttaatctcaaaaggcggggggcgtcggggggcagaggcaggtagcagcaacagctagtagcaaagatgcttctctctctctcctgggcccggcaggctggggggcactgcagacgggggctccggcccggccacctccccggcccccgggcgcccccgcctgaagccccccaaccccagcctggacctcactcccgctctcttgcacacacgcacacacgcgtccacgcaacttcaccatgagaatggaaataacaatttcgcattgtttttcttttttttttttctctttttttttttgtaccaggcagttaaaaaaaaaacaccccaaaaaaagaaaacacaaaaaaccccaaacaaccaaacaaaaaagctttgagctgtgtcctttcatatggagtcaacacgaccctcctcaaatatcatttttttttgtttgtttgtttcctgaaacgcgagaattcagcaggtatctttggcaacactttatcacgaccttaatttaaagaataaaaataaaatcgattcacgtctatatacagtatgtgattgcgcggagtctggggagggcggggctgggctgggggggtcccggctctgggcccatgcagaggctgtggcccccaggacgggcgggtagttaaggcaaagtgggcgggcaggacaggcgaagctgagtgcggagctaggaacgagggtttagtgcaatccccgaggtctgtgtaagtgtcgcggtgggccgcagcccttgttcctacggaagtcccagagggctccaccccccaagtccggtcgcccccactggctaggacgacagctgtgattttagagttggttttattgcgagggggtgcatggataggggaaggtggaaagagggctcacccctcagggggcctctctgggagctggggaggggtgtccctggcctgggtgttcaagctccccgctcagccacgacagatggttttctctccagaacagctcgccctgtgacactggggtgtgaacgcagccggggtgctgtcacccagccccaggggagaggggggatcctgagacatttggagggggctgacaggcttaagggggggtgggaagggaagggaaccaaaaccatcctgtagaaacaatatgaaaattgccttcttaaaaagcttccctttaacaatgaaagaaaaagagacgagaagatgtgtgtgtcacagagaagggggtatgggggggtcgggggcagggagacacccccccgccggttgggcattgacaagaagtctcagtgcagcagagcgtctattttcggggtcccatgctagcattgcatatgcaaacggggtgagggcgtcctggcatctggcgacatagtctccccaaccccggcccctgtccgtggcctgtggctcggtcaacaccgggccttgtgggagccagaggttggggggaggcaggtcccagtccccctggattacagtcagtgcctttgagtaaaaagaggggtgcctggggtggggagaggggcggtggttctaaggccctggaggtggggggcccctgtcacccacctcagcagggtaggcgcatccaaggtccagctccttggtggccatgcgggagggacaggcgtgttgggggattggggggtgccggatggggatcggggtgctccggctggaaggcccatccctgagctagggaggaggaaggagagaccccgtggacagaagcgggcgctaagacctcttcacgtcagaaccaaaaaaggggacagaaagggggagcggggggaacacagcacgaacaccccacagtcctgccttcgaggctgacgtctgggggtgaagcacaaacacctcggggcgtctcccaggtcccctgcgatggcttcctcctgaaccccccttctcgctttttggggaacagaagtggattctacgtttgtggtgggtttttttttttattattttgtacaaaaataaatcgacttttaggaatttcttctgctctcgctctctctctcgctctctctctcgctcgctttttttttttttttttgtcttttcaacttttcatagaagttggttgtaacttgtaaacatgtttttaaattaagaattaagataaagtgtagtacccgttccgttacaaagtgccaagacttctaatgtggttggttgcctttttttttttccttcctttcattttgtaaaaccttttttttttctagtttgttttattgcttttgtgacattggaatttgtggattttctctctctccccccatccctgccatcaccagaccctggggttcctctgatcgtgactctgtttatcccacactgttgcctgctcctctgaggaaaagtatattatttatatatatatatatatctatatataaattttgtttttaaggaggaaagagaaaaaaaaatctaaaaagtgctttaaaaatttgggagagggggctcgggggagaggacgaagacagaagttttgaatctccaaacgtgggggtctaggtggaccgggcgggggtgggggggcgccctgaggggtggtccctgggggtcccgccggttgtaagtgccgtgaaggaaggcggcaggagcacccccaggagccatcctggcgccccaccgggaaccccagtccgatctcctttctccaggcctagaaataaataggtttgtgtctcagtggccaggagacgtggggtgggcgacggggggaggccgcaggcagggttggaggcggggaggccactggggagatggagagggagacccctcccttagtaagtgccctgaggaaggagggtgcgggtcgggggacgggggcccattttaacgtccgctcagagcagacagaaatcatttaaggtcttgtctgaaagactcatagaaaccagcgaggggaggaaattaaaagcccaccccagtccccccccagcgcccccacgtctaccctccccccagcccagggcctcggatcgggccccaggccccatgccgggtgcccagggggctgtgcggggtctcggattccttgtgtcctacaaaaaaccccaaaccaagccccgaaacccagcgatggggtggtggggggaaggggagccagggagggccggggcccctgcggagggagaaaaacgtcagaaaggagggaaatctgagaaagcgctaccctagattctgtgacgcgtcatatatatatatctgtatatatatatatagatatagatatctgtatatagatagattttctttttttgtgtttttgggggggtggtgggtgattttttttctctctctctgtctctctctttctcgggtttctgttttctctttttggtttttaggcgagtccggctgtgaagttaccgtcggtggcggccccggggccacctccgctgtcacctcctccaccggcgcccgctacattcaaccggcccaagccgtcggggctggccacgtcctcgtcctcgtcctcgtccttaaagtgcttctcctggccgttgcgccgggcgtcgggggagctgggctgggcgggggcgccgggggtcgcggtggcccccgggctggggtcgggcgccccgccccggacgcggggcttgcggccgcggcgcgaggggacgccgttgcagccgtctttcttgaggtgtctgtgcaggtggtcggagcggacgaaggtcttgcagcagctgtcgcactggtaggggcgcaggcccgtgtgcacgcgcatgtggttcttcaggtcgtagttgtgggcaaaggcggcgccgcactgctggcacaggtacggcttctcgcccgtgtgcttccgcatgtgcaccttcagcttgtcctgcctgtggacggggcacggggcgggcacggtcagtggggccggggacccccgatccccgcccagggaccctcacggacacggcaggccctggatcatcacccttgcagaacacggaccgtgcaccagaggtttcggtgccccgatggggacggtccctcgaaaaacgagacgagtgggggcgatttcgcattctgaacatctaaagagggcctcggaccctgagtgctgtgtggccttgggaaaacgctatgcctctctgaaccccgtttcctttccttttttaactttttaagagacaaagtctaggccaggcgcggaggctcaggcctgaaatcccagcactttgggaggccgaggcgggcggatcacttgaggccaggagttcgagaccagcctgatcgacacggtgaaaccctgtctctactaaaaaaacaaaaaacaaaaaaacaaaaaacaaaaatcagccgggcatggtagcaggcgcccgtaatgccagctattaggaaggctgaggcaggaggatcacttgtatctgggaggtggaggttgcagtgaaactccgtctcaaaaaaaaaaatttcactttttaagagcgaaactccgtctcaaaaaacaaatctgccaggcgtggtggcgcaggcctataatcccagctacttgggaggtggaggttgcagtgagcccagatcacgccactgccctccaacctcggtgacagaatgagactgtctccaaaaaaaaaaaaaaagagaggcagggtctggctttgtcccccaggctggagggcagtggcgtgatcacggttccctgcagcctcgaactcctgggctcaagccatcgtcctgcctcatcctccagagtagcacacgcaccaccacaccctattaaatagctattaaactatatgtgtgtgtgtgtgtgtgtgtatatatatatatatatatatatatatatatatatatatatgtaagtttgagagatgggggttgagctacgttacccaggctaatctcaaactcctgggctcaagtgatcctcttgcctcggcctctcaaagctctaggattacaggtgtgagccactgcgcccgccatgaacccctttccctaccacagaaggagacagtgggcttctgccactccatcctgcccctacccctggggtaggatgaggccagccagtgcctggtgccttcattcatgccacagacctttgccgagcgcccgctgagggccaggccctgttccaggtgctgaaaataccgcaaggaacaagacaggcaaacatccctgccctctcgaggctggcggcggccgaggtgtttggtgacagatagggtgaccaactgttctggttttagcactgaaagtcctgcatcctgggaaacccctctgtccgggacaaagtggggcagttggtcaccctagtaaccaagtccccaccccacgacacccaggactgcccactctcccctcacttcagcgtcactcccctatctgggctccaccctgacgtgcaaaggtgcaaagcacaagctacgctggggcctttgcatgtgctgctcccgcagtccggggtactttcttttttcctcctggatcttcacagtcaaatttgggctcaaatgtcacctccttccccagccctgtctccatcctcctgtcatcaccacctgactcttctattgtttttttttctgagaccgagtctcgctctatcttccaggcttgagcgcagtggtgtggtctccgctcactgcaacttccgtctcccgggttcaagcaattcttctgcctcagcctcccaagtagctgggattacaggccctctgccaccacacctggctcatttttgtatttttagtagagacggggtttcaccatgttggccgggctggtctcggactcctgacctcaggtgatccacccgcctcggcctccccaaacgctgggattacaggcgtgcgccaccacacctggctgatttttgtatttttaatggagacagggttttcaccatgttggctgggctggtcttgaactcctgacctcaagtgatccgcctgcctcggcctcccaaagtgctgggattacaggcgtgagccaccgcgcccggccggtctctcttgtttctgttgatttccttgtttctcctctgtctccctgattggattgtgagccccgagaaggcaggggttgggtgtgacttgagggcccctccctgcctgtctcgccccatgggggcagcgtggacccagcttagcctggagcctctagcctacaaagccggtcaccatatcagtggggtgcctgtggcctaggtggctcctgaacccttggaatgtggccactctgaactgatgtgcgctggaagtgcaaaaggtaccccagcttttgaagacttgatatgcaaaaggtgatgtaaaatggctcaatgaggatcgtgcacattgactacacatggaaatgcatctactgggttaggtaaaatgtttcaagtcactttcaccaactctctttgactttttttgaacggggctgtcagaaaatgtaaaaatatgtaagtggcttgctggccgggcatggtggctcacacctgtaaccccagcgctttgggaggctaaggcgggcagatcacctgaggtcaggagttcgagaccagcctggccaacgtggtgaaaccccgtctctactaaaaatacaaaaattagccggcatggtggtgggcgcctataatcccagctacttgggaagctgaggcaggagaatcgcttgaacctgggaggtggaggttgcagtgagctgagatcgtgccactgcactccagcctgggcgacagagcaagactcgtctcaaaaaaaaaaaaaaaaaaaaaaaaaaaagtaggtgtcttgcctattcccattgagtgatgccaatctatagtaataaagtgtactccttcctgggatccggagggcaggagggagccctgggtctcaagagccctggctagaacctgacctactccttgctgctgcctgttgtgccccacatctgagccacctcgggtttcttccttctcacactcaatagactgaagacttctttagtgtggggactggcaaactcctactcatccctcaaagccctaccttgaatgcccctctacctttcctaattcccaaagacctggctcccctctgggttcctccagccctaagtccctccctctggcaccagctacagagctggtgtccctaactttaacccctccttggctctgttgccctgagggtcaaggcctggcccttggcaaccagacccctaccttatctctagccttgctgccccactgaagccaacagaacgtggtaacttgctaacagaaccctggcctaaccaggtctgttaccagcctccaggcctctggtttactgatcaccttctgcaaagcccacggcaaggtctccgggctgccttgcccagatctggcacagggccggggtcacagaggggatggcagccactaggtttttctagaaccgtgcagagactccccagatgagcctgggaggcccagagagaggaagggacttgcctggagctgcacagcaggccagagggccacgcagaggcggggtgggggcggaggtatccctagtttcatcaccccgagccccagcctgggtaattatagccccggccaccacaggccccacttactcaacgccctgctgtgactcagaggggcctcgggctcccaggcttttggagggtggaggtgctggtgtcctggggaggggggaccagagcacggggtgggggaaaagaggaagcaggtgggtctaaattggggtgggaggaagaggtctccacaattgtccctctctaagcctcagtttctctgactgaggggatcagccccgggtcgggtgggatagccagcagtgcccgagtcagaatgaaaccgggcctgtggcctgcggccagggaggcagggtgggggtcaccaccttcgctcagcctggtcccctctgcagaccccagttctctgcaccccaccaagctgctcttcctgagctcagagacgaacccacagtgacccctgcctggaggaagaggagccccccaagacctccagtaccccaacctcaccaaggagggacaaaccaccagctacactgcctgcctcccaaagtgccctttgccccctgcctggcactcctgggcgccggagtccaggccgcaccttcctctcctggcctgctggggagggggccggggtgctggggaggggtcagtcccagttcctgtccccacggggtggggttgggaagctgggacaatggcctctttcttcagcctcggtgggcgtggctgggggaaccccagggcgggcggggggcagggggtggtgctgagtcacccagcctggccaggtccctgcctgccagccccctgcccccaccgctacagcccgccccggatctacgaggcccagccagccacctctggactcctgagaccgaattgcaaactgcccgggcctggccttgaactcctgctgtttagggaccaagtcctgtggctcccaggggggcacagtgatctctcaagctgagctggcctcagggcctctgcactggctgttccctctgcctggaacgccctttcccacagctgctcctcccctccttcaggttccggcaaggcctgtccccggcgcctagaacaggcctggcaccagcagacgcttcataaatgttggctgattgaagcaaatgacccaggctcacgggaaactcagaagccgctccacggcctgggctgtccctccctaagcctgagggcctgtcaccctctcccaaagcagaaaaagaaaaaaatccaaaagtgcagaagagaagaaccagccctccaggaaggaagaacgactgtgccttcccgcccacctcccgcagctcaaccctgtccggcacgctttgcatatgatgtggctgtcatcttatgtctggcctgtgctgtcacccaccgggatgtccacccacaagggcagggcctggtctaggctgttcttaacagccacgtgggtcagggaagcgttcgttggctttgggcccaagaggtggggtgtgtctgtttgcgtgtgtgtgcatatatgtgtgtctgtgggtgcatgtttgcatgcatgtgcatgtatgtgtgcgcatgtacgtgtctgtgtgcatgtgcctgcatgcatgtctgggggtgcgtgtgcatctgtgtgcgtgcctgggtgtgcgtgtgtgcgtgcgtgcgtgcgtgcatgtgtatgtgatgtgtatgtggtgtgcgtgtgtgtgcgcgcatgtcggtgtgcgtgtgtgtgcgtgcatgtgtatgtgatgtgtatgtggtgtgcatctgtgtctgcatgtgtctgtgtagcatgtctgtatgtgtatgtggtgtgcgtgtgcgtgtgtgcgtctgtgtgtgtgcatgtgtacgtggcatacgcgtctgtgcatgtgtgtgcatgtgcgtatatatgtgcaagtgcgtgtatgtgtgtctgcgtgtgtgtggatgtgtaggtgacgtgcatgtgtctgtgcgtgtacgtgtctgtgtgcacgtgcgtgtatgtgtgcgtctgcgtgcatgtgtgcgtgcggtgcagggagagaggcgggaggggtcgtgagcggcggatgctggggcagagagcaggacggcgcctcccccgcggcgggcagctcacctggtgaagcggaccttgcagatgttgcactcgtagggcttctcgcccgtgtgggtgcggatgtgtcgcggcagcttgccggcgccctggatgaccttctcgcagatggggcacttctggaaggccttggctcggatcttcttctccaccttctgcgaccaggccgggtagacgtcgccgtcgtgggcgccgctgaagtacttcaggtagtagtccatgacgcccttgtcgtcggcccgcgactcctcgtcgctgtcccccgccgcggcccccgcccggcccaccgatgacatcatctgctgcagcagcgtgctggccgccagcccgtccacgtcgggcccgtccccgtcctcgccctcggccgctcccgacaggaagcccggagagtcgcccggctcgggggccgcctccgacagcgaggcggcctcctcctctccgccgcggccgtagtggccgttctgcgtggcggccggcggggccaccggcggcggaaagagacccccggtgggggcgtcctcatcccgctctggccacagacccgggttgctgtcgccctcgtccccgtcccccgtcgggggccgctcggccggggggcccggcccatagaagtctaagccgttgcagtcgcccgcggccacggcggccacagcggcggccacggcctccttggtggcatccaggtcatcatcggacgccccaaaggcggaccacgggaagctggcagcggcggcggcggccgcggggggcaggctgttcatggggttgctctggaagaactcgaggtactccttggcgcggaggaggttgcgctgatcaatttgatctacaaggtccagctgcccggcgtcggcgcccgcgtcggccgccaggatctgccggtccaggaggtcggcgcacacgtggctcacggcggggatctccagcaggcgggcggcgctgaggatgtcacccacgttggctgtgctgacggtgagcgtggccgtgtaggcgaagtccatgagcgcggtgagcgcctcggcgctgacgaagtcgatctcgtacacgttctgctggtccaccacggcgcccgacgtgaacagcttcttgaagtactggctgcaggcggccagcaccgagcggtgcgtggggaactcgcggccctccaccaggatcaccacgtcgcacagcaggccctgcgtccgctgctcgttcagcccactcaggatgtcgctgctgtggtcggggaacgggatcccgatggggccgtccacgccgccggccatcttccgcgccgagacctgcagcagtggggaaggagagggcgctcgtgagtgggggtgcgggggttcctgtgcccactgacaagggcccgaggcccttgagaagcagcgttccaccctgctcccccagcctcacattcccacctgcacgtgaaggcggtcagatgtcgcgcctttccagccccagcttccccagctgtgcaccaaagcgatacatgccctgcctccagcctcttttcttttttgtgtgtctttaatacagagacaggctatcaccatgttggccaggctggtctcaaacccctggcctcggcctggcgcggtggctcacgcctgtaatcccagcactttgggaggccgagacaggcagatcatgaggtcaggggatggagaccatcctggctaacacagtgaaaccccgtctctactaaaaaatacaaaaaattagccgggcgtgttggcgggggcctgtagttccagctactcgggaggctgaggcaggagaatggcatgaacccaggaggcagagcttgcagtgagctgagatcacgccactgcactccagcctgggcaacagagcaagactccatctcaaaaaaacaaaacaaatcaaaaaaccctggcctcaaatgatccaaccgcccctgcctcccaaggtgctaagattacaggcatgaaccacggcacccggccaagactgttttccatctgtgcatgaggatagccagatgtcccggctccccagcctcagtttccccagctgttcccaagtgcagtcaaatgtcctatcctctagcctcagtttccccagctgtgcatgagaatggtcagatgtcctgcctcccccagcctgtttccccagctgtacacaaaagcaatcagacgtcatgtccccagcctcagtttccccagctgtacaggaaggcaatcaggtgtcccactcccaacctgtttcccatctgtacacaagggcggccagctgtcctgcccccagcctcaatttccccagctgtgcatgaggacagtcaggtttcctgccccccatcagcctcagtttccctagctgtgcccaagagcagtcagatgccctgttctgtctcatcagcgtgagatgaggctggcaaaacccacactggacgcttaaatttcacaagcacactggcaccacccctccgaggagggcccccgggaatgcctgttgaaagggcactttgaggcccggctcggtgctcacgcctgtaattctagcattttggggaggctgaggtgggcagatcacttgaggtcaggagttcaagaccagcgaccagcctggccaacatggtgaaaccctgtctctactaaaaatacaaaaattaggctgggtgtggtggctcacacctgtaatcccagcactttgggaggccgaggcgggcagatcaccaggtcaggagatcgagaccatcctggctgacacagtgaaactctgtctctactaaaaatacaaaaatagatgggcgtgatggcacgtgcctgtaatcccagctactcgggaggctgaggcgggagaatcgcttgaacctggggggtggaggttgcagtgagccgagattgcaccactgcactcctgcctgggccacagagcgagactccgtcttaaaaaaaaaaatcagccaggcgtggtggcgcgtgcctgtaatcccagctactcaggacgctgaggcagaagaatcgcttgaacccgggaggcgaaggttgtggtgaacctggatggagccaccgtactccagcctgggcaacacagcgagactcggtctgaaaaaaaaaaaaaaagaaaaagaaaaagaaaaaaaaaaagggctgggcactgtggctcacatctataatcccagcactttgggaagccaaggcaggcggatcacctaaggtctggagttcaagaccagcctgaccaacatggtgaaatctcgtctctactaaaaatacaaaattagccaggtgtggtggcgcgtgcctgtaatcccagctactcgggaggctgaggcaggagaatcgcttgaacccgggaggcgggggttgcggtgagattgcgccattgtactccagcctgggcaacaagagcgaaactccgtgttggaaaaataaataaataaggaaagggcactctgaggcgctacaggaggacgcagtagctcgagagaagtgccctgatctgagccattttcctgttgatctgagcacgggcttcggccgatacagaggggaggccacgcagtgacctttacaaaacacctactatggccagacgcggtggctcacgccggtaatcccagcactttgagaggccaaggtgggtggatcatgaggtcaagagattgagaccatcctgggcaacatggtgaaaccccatttctaacaaaaaattagctgggcctggtggcgcgggcctatagtcccagctactcgggaggctgaggcaggagaatcacttgaaccaggaggtggaggctgcagtgagccacctagatcacgccacagcactccagtctggtgacagagcgagactcgtctccaaaaaaaaaaaaaaaaacaataacaacaacacataacacctacttcccgccagttccacccgaaccccaccggcagcacccactccgtcgtgagctgaggccacttgcccgaggccccaccatgaggacacagttgcgtccaaactcaaacccagagtggacctaagagccgaccccttggcctccccaaccctgactcctgcctcctggtcaggcctggttcttttcaggggggctctgagtcagcaggaaggggtgtggcagcccaggcacggggacccagtgccgaaacccagctgaggtcaaggccaccgtgggtgtgccccgtccggacagggccagtgactccgcaggctaaaccccttcctgcccctcagagcccccagcatagggctcagccctggctgtgagtaacagagaccgggctacagcccaggaggagcagggagccgggggaacccctgtccacctcctgcctgcccacaggactgcctggcagcccctccccaactctcagccaccccagctgagctgttcagccccagccaaggccttggccctctctgggcctcagtctccctatctgtcaaatgggcagaggtttcgggcagcgccgggccctggggggactgtgtctgtcccacccctttctccccctcccttttttccgccttcccctcggctgtgactcatccacccactcggagcttgtgcaaccctctggcccctgtccccacccctccgccctctcctgggagcccctggcggccccgagtcacccagcacagctcacattcctccaggccggccggtggctctcgggccagagcccctgggcaaggcccctggggagagggcctgagctgggcctttcatggcctcctccgggccaccagaccctcctgtcccccagcccagcagctcaggcaggctctgacgccgacgggcttgagccaggccccacaagggaggcatggtgtcggtccagccggacccaaagcccagggccctcagcgcggggcctgagctgccaggcgacacagaggcctttgtgagcttgctcagtgccaccacgctccccaggcccctccacccgccttccttccctccttccagcctcggcccagggcccagctgctcagcacccccgtctactctaaggcctgtggtggggcggtgggctcagatgtggctgctgggagcagggagggtaggaggggagcgaccccacccaaggctcggccctgggaagcctccgaggagtcccctttggtggtgtccaccccctgccaccatctgccgtctggccctgggccgcggggagcgtgtgagcagatggagctccggatcagacgggcccgggccctcctacccaccccagcatggggggagacctctgacccaggccaccaacgccccaagatggctatccctggcctgctgggccgttcctcccctcgggtgaccagggtccccgctctggagtggctgggaggtgtctttcctggggcctggaggatgggcccaaaataatccaggtggctcagcgacctcctgcaggtccccgccagtgtgaagatcccagttccaggttgggtccgggggtcccagtctctgccctctccagcctgggaccctctcttgggcccctgttcccccctaaatatcactgaggccctccctcaaagcagcgaggcccggggtgatgtcagccaaggaaagcccccgtgagaggactgtggccgcgttttacagatgagaatgccggggcccagagagggctgcagtcctggcctaaggatgcccggcagggctgactcccaggggctgggggccaggaaatgatggaggggccggtccccccacccacccagggcaaggccctgccctcgccctggaaactaaactcgctctgagacaactgacccacgccctcactccaggaacacaagccacctgccggccacgccctgcgccaatgcccccacctaggcctcctggaggcctcccctaaggaaagggccgaagaccctgcctccgaggtgggagaggggaggccgggcccagccagagcacccccggcgggggccacaaagtcttggcaataaaaagtccccgagtgctgaagccccactgtgcgcccgacacacggtacacgcctccggaggtggcggtttcgttcccctcctccaggaagccccggccccacgccagccaggtccccacccctgccggccagggtcccctgggctcggcccacacccacccggggccccatctttcatcacagctcctcccccgcgctggcctccgtgggatttccggggctgcttggtgctgactcggcggccgaggggcaggccctggcaggcccctcctgggctggaggtggggcgccctcctccccccgggccactcccaggcccctaagcccaaccctcccagggtggcgcatagtaggggcgcagcaaaccgccggataaaccagagacagcccacgccccggcccacccagctggctgccaggcatacccagaagcagggggctgtgcagcctgccggtcccacctcccatctaacctaagggtcacttgctgtagtgtttgtcgagagccacggcacccgggccgcatttcggccccctctgtgctcccaaactaactgggcaccttcacttcgtcttccccaggtccctgagaggctcagagaggtgaggcggcccagtcgaggtcacacagcagccctctgatctgggcagctgccacttcccagctgcgggggatgtgtcgtgagctcggaagcaccctgacgtggctcagggagcagcagatgtcgcctaggaaggaccccggcatcccaagaagggcaccccagcacggggagcatcaggaactgaggcctggaggtgggcgaccggggaagggggaccggcagagaggaggctgcatcgctagtgcagggtgtgggagccaggggcctccccaaggtcacacgacaaggtgagggctgggcaggtaactgccacccgccaccttcccgaaggtcacttcctggagcagggggccgtctaatgaggggatcagggcccccacccaaccctctgcccagggagagcagggaaggaggccaaagggacctctcacccctcatgtgctgtgcagagcagctcgggttcaagcctcggctcccccacctccaagctgtgtgaccttgggcaagatgcgagacctctctgagcctctgtctcctgggggatgggggtcgtaacagtggaaaggggccccccactgtggtcagggtcccgctcacatccattcagcaaacttagcccagggacctaatgtgcgccagagccagtccccaaaacacattgccaggctgttcaccacccctcacggatgggaactttgctcctgaatgctattccgggaattcagtcccctcctcacctaccaagggagtgagtggtggggcctgaggaggaagctggaaggggagatcaggcccagagagggtgggcggccggcccaaggtcacactgtaagcctggtgtgcaggtgcggctgccaggcccgcacccggcagcccccgccccctccccgcccagcggcctgtgttgcaaggttggtcccgacgggtaaccccgccctgacctggtgccaagccccgcctggcccagtcctcggcctgggtttaatgggacaggaatgcagtgtcccgatcggggggcaccaacggcctggggtggctgccagctgccagcccgccccctgcccgcctgccctcgcccgcaggcctccctctgggccagacatggagcaaacaggccctcggccattttacgtgtccatttattgccctaaatggggaggggcttcctgcctgggccttaaagggccagaggcaggaaggccgtggggacccagtgggaagtgtgacagcggggatgggggcagcgatgaggaggccagggggatcccatctgacgcccaactcatgggcgggactgaggcccaccctgttcccacactctgagatgtcatgggccaggaagcccagactacagcccgagcccaggttccaagaggaagcttcatgacgacagtggaggggctgagcttcccgtcactgggggcaagcaaggccagactctcggaagcccatccttgtccaccctgccatcagcccaggctgcacctgcttagctgagatgcctgtgagaggccgaggtgacctctctctccctcccctgagggaggcctgcttgtcacctggagatacctgccccacccccactctcgcctgagcaggtggaaggctcagcctgggagcctggcggcctgcagaatccggccagatccttctctcaggcatcctgataggtgggatgggccttgttttccagtcaaaccagaaaggcgtgggtggcgacacttccaccgagtggccgtccacagcctgctggggggacagatggaggggctggtcctttggccacgctcctcccgagcgccggattctctgaggggcgccttctgcgctttggggctctggactcggcgctcggggcccaagggccagagccgctcctcggagcagctgggggaggctgggccttgataatcgccccagagacccacggtacgtgacggcacccacagcgctggaaggcaggatctgtgtctgtgccccattttgcaaacggggaacgggatcagagagggggagcagcttggccagggtcgcgcagcagaactggaatttgagcacgggccgtctgtctggctctggcctgcctaactagtcctcccacggctccttccatcccctttcctggcccccggataccagcaggagatgaaatccccctaccctgggggctgagaggaaggacggcttatcctcataccctcagagctgccttgcaagggagctctcacacaggagcctggggcagggctggagtccagctgacatgggtggctcagggaggggcctctgcccctccagctctcaagacagctccgcaggggcctgacacagtgcacagtagtcgctcaacaagcattcccaatgagccgctgagcgaaccctcgagacaacactctagggctgatgaccatctccccactgtctggatgggaagactgaggctggcagagggggagtgactgctggggtggacccaagggctgggctaggactggaccatgctcacccccacccaaggctcacccccacccaagctcgttcctcttgtccttgttgcccagggctactgcagggcagtttatggtctggcaggtgacaggtgggggtgcaggtgtctcacgcagttctgacccacaccccacactcaggtctctgccatgccctgagctgacctgggagtttccgccgcggaggagaaaagacaccacgggtggctttgcaggcagcagctgggggaccctccacagccccaggaacacagcgcgccccggctgcaggggtcacggggctcatccaaggtcgcagagcaagcgtgccagcattccaacccttgaggagccctccttggagcatctgggctgcagtgggctggctctggggaggtgacctcggtctcctctggtcataaaacccagagccctgcccgcctctgaggaccaaggtgagacgagtttgtggctcggcaggattgcagaggggcctcgtatgcacgtgcgccagccagggcctgcccggtgaggcagggaggcgagagggctgtggctcgtgctgtgtgaccttgggagccatgctggccctctctgagcctcaatgtcatcttcggacacagggtttaataagcctcggtgacactccatttgcaggcaggtgcctgcagttgagcctctactgccaacctccggccctgcttaaagacaggtgggcaggcgcccctgggccaccacacagtgggaggggactttggacaggccccgagctggaaggatggagcacagggggcagctctgaccccacctgagtgaccttgggccgctctctgcttccccctacgcttcagtctcccctgcctagtaccggcacctgctccgaggcttgctctaacctccggagtttccaggctcacatttgacctcccctcccggccttggtttcctcctcatatggcaacggggatctgccaccaggtggacccagctataggtcagagggactcaaggaaagaaaaggaaaaaacaaacaaacaaacaaacacccagcagggatttgtgatcgccccaggaacctttccgaccaggccccaggctgggctctgcctcggccgcgcctcagtctcccgcacagagcaaaggacccatccactgcctgcggccgcccgcgggcctctgccgatgcgtggctgcccgcccgggcccaggtgctgactggccgccacgcagccaatcggaactgaataataaataccccccggactgacccacgaattaaaatttcagtgtcccggttggctcttctttccttccttagacttcgcttttccagcggccggctcctgcccccccttctcccccaagctctgtctccacagcgatggctggtggtaaacagaggccccggccccgccgataggtgctctcggggccccatggcgggtggccctcgcggacaaacgcccccggcctgaagccctcaggccctggcagcagcagggctgggcttaggcctggcctggcctgggcccctgccccagcctggcctccccgggacctctcccagaccagtttgccaataggaagtgatcggccggtggtggggaggcacccccagtgtgggagcggcacgctcagggttacgccctggtccagttctgaggttggggcggggggcactgacacggaatccccacgccctctccggaggcagctggcagggaggtgggggggcccaccgagcccgccacccatgggtgagccaggtgggtgccgcgggtggcaggggcaccagcacctctgtgacttccgccgcctgactggggggagaggagttgctgcctccccccgcctcgccgccaactcctggctgcattccgccaacatttagtgggcgccgactgggtgtccgggcccgggtggacagcaacctcccgccgcggcccaccgtgcgcccccgccagccagcccgggcagcgcctcccagaacccgcagaggcccggtccctgggggggcacccgctcctccgctccgctcagcccccagccaggctcccaggccgggggggctgggtctcccgcccgggaggtagggagcgggagggagggggctggatcccaccagctcccccctcccctgcccgggctcaggcttcgcacgtggtggtggcgtcaagggaaaggagggggggtccgggccagaggagacggggtcacgcgctttgggggcgcggacggcggggactggggtgctctctccgccccctcccgcgggtcggagccggacggccgtccgggcagggcgaggggccaggccaggccccccacccggggctgagtcaggcccgggcgggggcaggaagcggccccctcccccgccccggccgcagcgcgcggcccccgcccggcccgcggtcccccgccgcctcgcccgcgcggggggctcctacctccttcccggggcagcggcgagggggcccggccccggcggcggcggtggcggcggctgcggctgggctggctccctccgaggggccgggaggcggcagtgagcctggccccgcgccaccccccgccgccggcggccaatccccacccgggctggggggagggcgatgcaaattaccccggatctgggtccgcccgcccgcctcccccacgcccgggcccggcctgcgctaggccgcgcatccccgggctcgcctgcaccgcgcggccgcccgggccgccgccctccccggggagcgcggggagggtgaccccccccccacgggcggggggccgaggggaggggggctggggacggttacacaaccaggcggggaggggccccggggcggggagggggccggcccgcgggccgcgcagccggaagccgggaccgccaccggcccccggcgaggggagcccggctccaggccccgccccctggcgggctggccccgcccccgcgccgcgccgcgcgatcggcccgcgcccattggctctccggcccgccgctcaccgcccctcctccgcaccgcccctacccgcaggccgcggcgggctgtcggcgcggggcaccctgggacttgtagtccaagccgcttgccacctgccggctgcaaacggcggagggactacgaagcccagaggtccctgcggccctgcccgcccacccggacaccccaccccttccccctcctttccgaagcccccctccctgttttttcagccccctcccccccatcccccatggagctcaatcctggccaactccaacgtatgcacgcagcaccgaataggcccccggggggcgagagcgcccctcgtcttcagctggaaacttagcaggcgacgcgcccccctatctccccacgccggctccccccaccctcaatgcagccctgcttcccctcccccgctccccgcgcgcctgggagccccgaaaagccatgcacccgggttggggggggctggcgcacaagctcatgcacttagcccccaatccccccttcccgggcggcgccccctccccgcgctcgggatccagggcgcctccagcctccgggcagctgccaaccaccccttcctctgaaacttgggggaacgtccccggctccccggatctccccttcccgagggggcagcggtggccgcagcgacccccgcccgtccccgccctgcaccccgtgccgggggccgcgccgggcgctgacttacctcgcggggccgggccggggcgcgcggggccggggcccgaagttgggactgggctccctcggccgctcgcctccggggtccgcggcgctcgctctgcccgcgtcgcgctgccctggtcgctccctcgcgcggcggcggcggcgtcactgcccctacagtaactgtacagtacagccaaagccccgtatgatgctcgcgactcccttcctggtttctccgagggcaagaggggtcctcccttgtcttaaaggtgccgcagccgccggcccccccacgcccagcccgccccccccagcctggcctcggaggccagaacaggctcggcaggtcccctcttgccacgtctctgccctcccgtggggcttcgcccgctgcgccggggagaccgggctgttattaggttttgtcaagtcgggggggggggtccggcccgccccggcgcgcccccccgcctctgacctctccgccccgccgcgcggcgccgtgccagcttgccagcttatctggccccagagctccccggggcgcggggggagcgggccccccggggtggagggggggtgggggcctccagataaacaggcccccagcctctgcgcaggggcggggtgcgggggggcgcgggctgtgcccccgacgcccggggcgtggcaggatggcagcgggggcggggagcgcggtgcgcacagcgaggagcgacgcgggcgtgtgggtcgcgcggcctgggctgccgggggtgggttgggggtgaggcggtggggatccccccgcaaggccaggccctgggcctccccgggcctcagtgggacttgccgcgccagggaccccggggggtggccttgccaaggacagcccgggtccgcggggctcccgggtccctaaatgaaaccaccaacctgccctcccgcgattatataaaggagtcgcctccaccccgctgcgctaggggcgtcagcgggggaaggggttggcgaggggcggggagggcggttgttttcccggcttcgcgagttcccccacccggctgcgggccgcggggcgggacggggaccgggccctggacgcctggtccgcgcgggccgctccttggcacaagggggtctgcatggctcgcgaggggcggaggtggggagtggggaggcgttggttcagcgcgacttttttttttcccctgtccgtttctcccacttcctccccggtcgtgggagaggtccggcgggggacagggaagggggagcagggcacgagtggtgagaacgtcctggcccggcccggggagggctggctggtgcgaccgcgcgcctgggggggggggggagggctccaggactcagtttccccttcctcattcctccagacagagagagtactgacagctgctttagctgccgtttagtgagcgcttatccagtgggtgaccctgttccggggctcactgtgccttcattctaacacctaatcccagggtcattattatgttttattattatctggcattcttagtaccaacaccacctgacagcgggaaccaccaccggcctgggtgtagtgtacccagcctgtcctctgacttcaaagcctctcctgcgagagacacagtttatggcttcttcgcacaatttattaaaagcgcctttcaacacccaaacgggttggattggcttttgtaataataatctggctacgaggggaaacccgggagggccccccggaggggaagtggactgtctcaggactcgcagcctgaaaccagccgggtaggtgggaagggacccagggaggggccgcgtggatctagggcgagggtgtcatccagggactttgctccaaggaccctgcctgggatagaaatccttcttccttcaaccaccggccatcagcctcgggaccaggaggccacgctgaagcacgattcttcccagatcccactgttgtgtttggatttctgcaaatgatgcccagacgtttttttttgttttgtttttttgttttttgttttagacagacttgctctgtcgcccagcctggagtgcaatggcacgatcttggcttactgcaatctccgcctcccgggttcaagcgattcccctgcctcagcctcctgagtagctgggattacaggcacctgccaccacgcccggctaatttttttttttttttttgtatttttagtagatacagagttttgccatgttggcaagcctggtctcaaactcttgacttcaggtgatccaaccaccttggcctcccaaagggctgggattacaggcgtgagccaccgtggctggccttggttttttttgtttgtttgttttgttttttgtttttttaatagagatttggtggggccgtgggggggtcttgctatgtttcccaggtctcaaactcctgggcttcagtgttcctcccacctgagcctcccacagtgctgagatgacaggaatgaaccatcgtgccagcgagacgcccaggctctaagctctacatggtctaacttcccccacaccaggagcagcaggtgactcagtttcccctcttgtaccaccagcctcagatccgatcctgcaggaaaaggatcgagaaagccccactcggattctccatggtgagaacctgactcagaggggcaggggctcctctgtgagacgggcatggaccctaatcctcatcgcagccctgagaagaagcagagactacaatttccaccatacagttggggaaactgaggcccagagatggacaaggagcaaggatgttaagtccagcattcgcgtgtctctggacgctgccagggggaccaaagggaggtccttcaggaagtgccaggatgtggcacaccccaaaccacgccccccgcccctgtcatgaaaacagaacgaaggggacccaaagcttcctcctgacctctgcccttcacttcctttttcctcccccaaccaaaaaaaaaaaaaaaaaaaaaaaacccgagttgatactattgaaaacctaataaagtataaaagattgggttgctgtgtgatcttgggcaggttgcttaacctctctgatcctcagactcctttggagagaagaatcgatgcaacttcctagtgttgtgacaagggagaaatgagacggtgcatggaacgctgagacagcacaacccctgcaccagggaggtcttcattacatgataggtgtgattatattattaatgtttgagtcacgcctattatttttgtctctgtgtagccaggggttttctgtttgtctgtttgtttgtttgtttatttgtttgtgagacagaggttcactcttattgcccaggctggagtgtaatggcacgatctcggctcaccacaacctctgcctctcaggttcaagcgattttcctgcctcaacctcccaagtagctgggattacaggcatacgccaccacatccggctaattttttttttttttttttttgagacaagtctcacactattgcccaggctggagtgcaatggcacgatctcggctcactgcaacctccgcctccctggttcaagcgattctcctgcctcagcctcctgagtagctgggattacagccgcgcaccaccatgcccagctaattttgcgtttttatagagatggggtttcactatgtgggcaaggctagtctcaaactcctgacctcatgatccgcccgcctcggcctcccaaagtgctgggattacaggcataagccaccgtgcccggcctctaattttgtatttttagtagagacggggtttctccatgttattcaggctggtcttgaactcccgacctcagatgatccgcccacctcggcctcccaaagtgctgggattacaggcgtgagccaccgggcccggccgtagccagggttattatccttggtggatagatgtagacaggggaccagggaggaggagtaacttagcaaagacacaaagggagtggctggggggacttgagtttcagttacgttgactagactgtgctgtgaagtcatgtaatattttattttatttttatttatttatttattttgatacggagtctccctctgttgcccaggctggagtgcagtgccgcgatctcagctcactgcaaccttcacctcccgggttcaagcaattcttgtgcctcagcctcccaagtagctgggactacaggtgcacgccaccatgcacagctaatttttgtatttttactggagatggagtttcaccatattggccaagctggtctcaaatccctgaccttgtgatccacccaccttggcctcccaaattgctgggattacaggcatgagccaccgcgcctggccccatctccattttttaaaaataaatgaataataataataatgaaatagaatgtttattttattttattttatttttttgaggtggagtctcgctctgtcgcccaggctggagtgcagtggcgcgatctcggctcactgcaagctccgcctccagggttcacgccattctcctgcctcagcctcccgtgtagctgggactacaggcatccgccaccacgcccggctaattttttttgtatttttagtagagacggggtttcactgtgttagccaggatggtctcgatctcctgacctcgtgatccacccacctcggcctcccaaagtgctgggattacaggcgtgagccatcgcgcccggccgaaatagaatgtttataacagcataattcacaacagccaaaaggtggaaacaattccagtgtccattgctattattcttttctttctttctttttttttttttttgagacagagtctcctgtgtcacccaggctgaagtgcagtggcacaatctcagctcactgcaacctccatctcccaggttcaagcgattctcctgcctcagcctcccaagtggctgggattacaggcacctgccaccatgcctggctaatttttgtatttttagtacagaagaggtttcaccatgttggccaggctggtctcaaactcctgacctcaggtgatccacccatctcagcttccctaagtgctaggactacaggcatgagccactgcgcccagcttccattattagatcaatggataaacacagcataggacatccacacagcggaatatgactcagccatgaagaggagcaaagctctgatgcaggccacagtgtggatgcaccttgaggacatcatactcagtgagagaagcaagacacaaaagtccaaactgtgtgatcccatttctctgaaatgtgctgaacaggccaatccatggagatacaaagtggatgcgtggttgtcagaggctggggaggggaatgggggtgactgctattggacatgaggtttattttggtgatgatgagaatgttctgaagttatatagaagtaatggttccataactctttcaatattctagaaacaactgtgctttttatttttcatttttatttttatttattttctttctgacggagtctcgcactgttgcctgggctggagtgcaatggcacgatcttggctcaccgcaacctccgcctcccgggttcaagcaattctcctgcctcagcgtcctgagtagctgggattacgggtgcccgccacaacgtcccactaattttttgtatttttagtagagacgagatttcactatattggccagactggtctcgaactcttgaccttgggaaccgcccacctcggcttcccaaagtgctgggattacaggcgtgagccaccgtgcccggccttgtgctttatttatttatttatttatttagagacagagtatgactctgtctcccaggctggagtgcagtggcgcaatcttggctcactgcaacctctgcctcccaggttcaagcaattctgcctcagcctcccaagtagctgggactacaggcacacaccatcatgcccggctaatttttgtatttttagtagagatgaggtattaccatgttggtcaggctggtcttgaacttctgaccttgtgatccatccgccttggccttccaaagtgctaggattacaagtgtgagctgccgcgcctgacctattatttacttatttatttagagacagagttttgattttgtcacccaggctagagtacaatggcgcgatcttggctcaccgcaacctccacctcccgggttcaagccattctcctgcctcaacctccgagtagctgggattacaggcacccaccactacaccgggctcattttgtatttttagtagagacggggtttctccctgttggtcaggctagtctcgaacttctgaccacagatgttccacctacctcagcctctcaaagtgctgggattacaggcgtgagccaccgtgcccgacctaattacttttctttttattttgtagatagagacagagtctggctatgttgcctaggctggtctcaaactcctgggctcaagtgatccaccagccttggcctcccaatgtgctgggattgtaggcatgagccaccgtgcccggccatgccttcctgtctcatttattcactggacaaaaatggaccatgtgctttccatgggccaagtccctgctctccagcgtacaggctagaggaggctaaagatagtaagaaagaagacaaatgaatacaaggattccagacatcatgagtgcaatgagaaaagcaagccataggaatggaaataccaggaccagtcctggagaattgttttttgtttgtttgtttgtttttgagacggagtctcgctctgtcgcccagcctggagtgcaatggtgcaaccttatctcagctcactgcaacctccacctcccgggttcaagtgattctcctgtctcagcctctgagtagctgggattacaggtgcatgccaccacccccagcaaatttttgtatttttcgtagagacggggtttcaccatgttggccatgctggtctcgaacttttgacctcaggtgatccactgccttggcctcccagagtgctgggattacaagcgtgagccaccatacctagccagggaatttcttttttttttttttttgcataattaggaaccaagcgcagtggtgcatgcctatagtcccagctatgtgggaggctgaggcaggaggatcacttgagcccaggaattggtggctgcagtgagctatgattgtgtccgtcagtatcctctgcactccagcctgggcaacagagcaagactccatctctaaaatttaaaataataataataggccgggcatgctggctcccacctgtaatcccagcattttgggaggctgaggcgggtggatcacctgaggtcaggagtttgagaccagcctgaccaacatggtgaaaccccatttctactaaaaacacaaaattagccgaacgtggtggcgcacgcctgtaatcccagctactcaggaggctggggcaggagaatcacttgaacccgggaggtggtgagccatgatcgtgccattgcactccagcctgggcaacaagagcaaaactctgtctcaaaaaaaaaaaaaaaaaaaaaaaagggccgggcacggtggctcaagcctgtaatcccagcactttgggaggccgaggcgggtggatcacgaggtcaggagatcgagaccatcctggctaacacggtgaaaccccgtctctactaaatatacaaaaaattagctacacatagtggtgggtgcctgtagtcccagctactcaggaggctgaggcaggagaatggtgtgaacccagggggcggagcttgcagtaagccaagatcaccccaccgcactccagcctgggcgacagagcgagactccgtctcaaaaaaaagaaatgctagaatggatctacaaatagaaggaagacgacgtgacgatacacaatgaatttgttttcttgtggacaggaatcgttgcaattattatcagttttctacaacttacggggttgtgaaataactcaaagatagcaaaagacacagagatcccacagaatcagacaaaaccgacttgtgcctagaggctatttcattttttaaatagtcctgaagggcctacacggtggctcacgtctgtaatcccagcatcttgggaggccaaagctaaaggatcgcttgagcccaggaggtcaagatcagcctgggcaacatagtgagaccctgtctctaccaaaaaaaaaaaaaaagatcatgaagatgatttcttcaaaggaagtgatgtttgagcagagatcttttctctcctttctttctttctttctttctttctttctttctttctttctttctttctttctttctttctttctttctttcttttattttggagacagagtcttgctctgtcaccaggctggagggcagtggcacgatctcagctcactccaacctccgcctcctgggttcaagagattctcttgcctcagcctcccgagtagctgggattgcaggctcctgccaccacgcctggctactctttgtatttttagtagagacagggtttcaccatgttggtcaggctggtctcgaactcctgacctcatgtgatccacccatgttggcctcccaaagtgctaggattacaggggtgagccactgcgcccggccatgagcagacatcttaatgaagatagaattagctgaagacctccgtatgtttcctaggtgagaggaacagccaaggtgcccagagtggctgcagttgggagccagagggcacccagtggggacttgtggccgtggtgcaggctgtggactttatttaaagtgttctgaattcagccatgaaaaggaaggaggctctgactcaggccaccgcgtggatgaaccctgaggacctcacactcagtgagggaagtcagacacaaaaagccacacagcgtgtgatcccatttctatgaaatgtccaggacaggccaagccacagaggcaggaaggggatgcgtgggtgccggggtcgggaggggcatgggtagtgactgccgatggggatggggcttcctttctggggtgataggttctgcaactagatagtggtgatagttgcacaagtctgtgaatgtattgagaatgactgaatcgcaccctttaaaaagggcaggctcaaggctgggcgcggtggctcacgcctgtaatcccagcactttgggaggctgaggcgggcggatcatgaggtcaggagttcgagatcagcctgaccaacatcatgaaaccccatctctactaaaaatacaaaaaaaaaattagccgggtgtggtgacgtgggcctgtaatcccagctactcaggaggctgaggcaggagaatggcttgaacctgggaggcggaggttgcagtgagccgagattgcgccactgcactccagcctgggcaacagagtgagactctgtctcaaaaaaaaaaaaaaaaaaaaaggacaaactcatgcctggaaccccagcactttgggaagccgaggcggctggatcacctgaggtcagaagttcaagaccagcctggccaacatgacgacacccatctccactaaaaatacaaaattagccgggcatggtggctcatgcctggaatcccagcactttgggaagtcgaggcagccagatcacctgacgtcaggagttcaagaccagcctgaccaacatgacgacaccccatctccactaaaaatacaaaaatcagccaggcatggtggtgggtgcctgtaatcccagctacttgggaggctgaggcaggagaatcacttgaacctgggaggcagaggttggagtgagccaagatcgtgccattgcactccagcctgggcaacaagagcaaaactctgtttcaaaaaaataataaataaataaataaataaataaataataaaaggtacatattctggtatgtgaattatatctcaatttatttatttatttattattttattttttgagactgagtctcattctgtcacccaggctggagtgcagtggtgtgatctcggctcactgcaacctccacctcccgggttcaggtgattctcctgcctcagcctcctgagtaactggcattacaggtgtgtgccaccacacctggctaacttttgtatttttactacagatgtggtcttaccgtgttgaccatactggtttcgaactcctgagctcaggtgatccacccgcttcggcctcccaaagtgctgagatcacaggcgtgagccaccgtgcccggcctgggagaaatactttctgagctgctgatttctccatggcttctgaattcatagcggttggggagatggtgcctgggtattttcacctgggcagctgctaagaggtgacttctatttgttccagaagacagaagccttggtagctatgctgggactggatccgtgtccaccacaccactcagaattcccatctgcaatgggtcccttctgccccgtttttaccaagcccagttccctctctgcaactgagaggcagcctcttgccccaccccctctcttccagactggatggctgcctcccaggcacctctcaggacctggccacagagctccaaagcccagggcctgctgccttttgggtcatggctcagggcccagtctctacctctctctgtggcccagtaccctttagctcaggaggtctcatctggagtgactctgcctccttccaggcgatactgggtgatatctggagacatttttaggtgttgtgattggggagggggtgggtggaggccagggacacagctcagcaccctgcagtgcccaggacggacccaccccagaggttgatcaggtcccatagtgtccaccacaccgaggggctgaaattctagcctgggtctaacttcagtcttgctcgctgtagaaggcacccacacacttctctcctctctgtgctctgcagagaagaaaagccactggccagtgacccctggacaaggcaggacttcagccatccactgccctccaccaccacccctgggcacccccttgtccaaagcagacagtctctactctgggataagggggggaccctggccccaggctttacccactttggggtgattcctggaccctggagatggaccccaagggtcaccctcaccccacgggacctcccaacaatggacaaggccagtctgtcctctcccccagcccccagttgtgcagaatcctcaacatggcacccccagtgtggagctgaagactccagacttcaggggtgggggcggggctgtgggaggggagatcatggctgcggttctggtccagccagacctcctgggtttgttctttttttaagaaccaccgcaatttaaagagcggagtcctccctccctgcagcccacctgccacgtgggctggcccctgttcccctctccttctctccgtctctgcctgccgggcttgggctgcgggggccggagcttccgtttcactttggtatcaccggtttcactttcagggctggggacagagagaggagaagagggacagagagatggacagagccggggagggtggccttgttaagtcgggggccggggaggggtccaccacctgccgctccttttcctgaccttcctgaccttcttctggcctggccggggcgggggggggggggggggtcctggaagtcaaggtcatggggtcaaggtcaagttctccctgtgtgaccttgggtgggagaagcaacttcccactatccctgagcctcctttcctgaacccctcagttacccaaaagtggggctaagaatcacgtacaccccacccggcgctgggaagttcaaagattcctccagcaccgcggaccatcccataatgtccccgtgggagggggcggggccaactcccaggcagaacaggatgtcggccgctcctttggccagggagagacccttggcccagaaaccaccgggaaggaggctccgggctgcccgagtcccgagcccgggatgagccactgtcccccagaacccccagcggaggctggagctctgtccgctagcagatccaggctggaaattcagttgggcatggccttgtcccaccccacctccatccccaccccaccctcaggtccttcctgcttggtgggggcctggggcttgagccactcactcaagagcagggactgggacccactgacctccctgtccccagcacccccacagggcccagtcaaggtggggcaggtgcttggtgctggtcagacaggataggggagtgaccatttgcatgtcaatatcaataacatatctcggtagagataggcggttagtctgtgtcaaaatgtgagagggcggtagttttctttttttttttttttaacagctttattgagatataattcacatgccatgcaattcacccatttagagtatagagttcagtggttttttgtttttcttttttctttttttggagacacagtctcactctggagtacagcagagcagtctcggctcactgcagcctccacctcccaggttcaactgattctcgtgtctcagcctccagagtagctgggactacaggcgcccaccaccatgcccggctaatttttgcattttagtagagacagtgtttcaccatgttgcccaggctggtcttgaactcctgcgttcaggcagtctgcccgcctcggcctcccaaagtgctgggattacaggcatgagtcacctcacccagcctcagtggtttttagtatagtcacttggctgggctggatggctcacacctataattgcagcaccttaggaggcgaagaggggcagatcacttgaggtcaggagttcaagaccagcctggccaacgtggtgaaactccgtctctactaaaaatataaaacttagccaggcatggtggcttgcacctgtaatcccagctactctggaggctgaggtgggagaattgcttgaatccgggaggcagaggttgcagtgagccaagatcgtgccactgcactccagcctgggcaagagagccagactccatctcaaaatataaacattaaaaattaagaaaaataaaaattagcctcttcattgtaaaacgggaataataaaaagagagaaaataaataaataaatattaaccagccgtggtggcaggcgcctgtaattccagctagttgggaggctgaggcaggagaatcacttgaatctgggaagtggaggttgcagtgagctgagatcacaccactgcactccagcctgggcaacagactgagaccccgtctaaaataataataataataataaaaaaatggatagaaaggcagcaccagctggctgaggtgctgaggggatccacctgggctggcagctctgtgctcctggaaaagccccttctccaccccacacagggcaggaacccaggacttccaaacaggaggcttagggaggctgctggaaccttagaaacccacattagcagtccagtgcagtggctcacacctgtcatcccagcaatttgggaggccgaggcaggtggatcatgaggtcaggagttcaagactagcctggccaacatggtgcaaccccagctctactgaaaatacaaaaattagccgggcgtggtggcaggcgcctgtagtcccagctactcgggaggctgaggcaggagaatggcgtgaaaccgggaggcggagcttgcagcgagccgagattgcgccactgcactccagcctgggcaacagagactcttgtctcaaaaacaaaaaataaataaataaaaagggaaacccacgttagcatttacaggtggcgccctgcggaggcccagagaggtacagagacaagtgggctgggtacacaatggcccctcccctttaatgatggggagagggggcatggcgcggtgactgacacttgtaaccccagcactttgggagaccgaggcaggaggatggaggataccttgagcccaggacttggagaccagcctggccacatgacgaaaccctgactctacaaaaaaaaaaaaaaaactagtcaggcatggtggtgtgtgcctgtcatcccagctactcaggaggctgagacaggaggttcacctgagcaggaggctgcagtgagaggtgatcgtgccgccactgccctccagcctgggtgacagagtgagatcctgtctcaaaaaaacaaacaaacaaattatggggagagaaggggaaagggagaggggatggggaggggaaaggagggaggaggtggagggagagagggaggggtggggaggggaagggggagggggaagagaggaggaggagaagggggaggggatggggagggcaggaggaaaggagagggggaggggaagaggtgggagggaaagagtagggaggggaagacagggaggggagatgaagggaaggggagggagagagggaggggtggggacgggaaggggaaagggaaaagaggggaggagggggccgggcatggtggctcacgcctgtaatcccagcactttgggaggctgaggcaggcagatcacaaggtcaggagatcgagaccatcctggctaacacagtgaaaccccgtctctactaaaagtacaaaagttagctgggcgtggtggtgcgcacctgtaatcccagctactcgggaggctgaggcggaagaatcgcttgaacctgggaggtggaggttttagtgagctgagattgtgccactgcactccagcctgggtgacaaagctagactctgtctcagaaaaaaaaaaaaaaaaaaaggtatggggagtgtagagtggatacctgcaagtgtcagctaggactccagtctaatctcccttgcagggttccacattcaggatctcctctttcctcagcccacctggctctggcactaggatcttatgaaatcccagggagctccctcctgtgtctgtgatcattgctcctcctcccttctccttgatgctcctcctcccttctccctcctcctagatgctcctcctcctccctcccgcctccttcttgcccctcctccctcctcctccctgcccctcctccctcctccctgctcttccttcctccctcctactcccccctcctcctccttgcctctcctccctcctccctgctcttctctgctcctccttcctccctcctactcccccttctcctctttgcctctcctccctcctcctttcctctcctccctcctcccccctgctcctccttcctccctcctactcctccctcctcctctttgcctctgctccctcctccctgcccctcctccctgctcttccttcctccctcctcctccttcttgctccttcttcctccctactcacccctgctcctcctctctcctcttccctactcctcctccctccccctactcttccctgttcctcctccttcctcctctctgcccctcctccctcctcctccatgcccctcctccctccttcctcctccaagagcccagggagcccagtgtccgtggggacagagctgcaaaggcctgacaggaagggtctcccgaggcctgagaaacggtgtgagcttggtattccgggaggaagggggacccaggacagccactcagggcccagcctttgtctctgcacagagctcaaactggcttgagggaggaagggaaggcgacctggacggcggtgttcctgggagtgcgagttccagatagttctagatactgacggaagttgcggcaacatctgcatttgaacctgccactgctccaggcctggtgacctccagcctttaacctttgtgtgcagtgagccttactccaagaggcaaccagccaccagccaccagccacactcagggggcccagtagggaccccgtgccttggagggccctcagtgccatcttggcagcgatgccacagctcaggaggttgtgccaggggctttcaaagctgccccccttggccaggagcagtggctcacgccagtaatcccagcactttgggaggccgaggcgggcggatcacgaggtcaggagatcgagaccatcctggctaacacggtgaaaacccgtctctactaaaaaatacaaaaaaattagccgggtgtggcggcaggcacttgtagtcccacctactggggaggctgaggcaggagattggcatgaacctgggaggcagagcttgcagtgagccgagattgcgccactgcactccagcctgggtgacagagcgagactccatctcaaaaaaaaaaaaaaaaaaaaaaaaaagctgcccccctttcttgcctggagggaggaagggatctcagcttcatggccatattttgaacctcgttgctcccagcccgcgcccccagccaggctgggcctctccaagggcccctgtcacccagtcctgccacccagcctttgctgacaccgttgcccatgttggccccgccactgttgggaatgtcctctccagccctcagctgtggattcccctccttcccaggacttctcctctaggtgctggctaaatttgcctttagcccttagggcggctataaattctaatttctgggcccgagcgagcgccgtggggaggctgcaggctccccagcgatggacaggggctcttatcttttaggatcccacagagcactgcagaaaagccccaaatatttgtgggtcacgaaggcagtgtcctgtcaggggagacagcaggatggtgggaccacaggatcgtccatgtcttccctgggggaggttcgagtcaccttcagaaggtcacctaacttgcagggactccgctgccgcagaggttgtgtggggagaggcaaacctggtcagcctattttgtggggtgcaaacagaagggatgtgggcctcctcggaagtctgcagagaggattcgctcctccgtggacgcttctctcttttcttgagcctgtgatgagttcctttgcaaatagggaaactgaggctctcagaggggattctatcttccccaaggtcacaggcccaaggacagcagaaatatcgtcaggcctgtggtcctgatgttcaaacaggaggccctggctggccgcagcgactcacgcctataatcccagcacactgggatcagaaggattgcttggggccaggagttccaggagtttcaggccagcctgggcaatacggtgagaccccatctctacgagaaagtttcaaaaaatgagctgggcatggtggcgcgcgcctgcagtcccagttactcaggaggctgaggcaggaggatcgctggaacctgggaggcggaggctgaagtgagctatgatggcgcgccactgccctccagcctgggcaacagagtgagaccctgcctcaaacaaaaacgtaaacaaaacaggaggccctgctctcctgaggggctggtggtgagtcactggtagatgggagagagctggggtcagggtcccagctgggggggtgggtcctcacctgtgctaccctccagggggcctctctccaggcctctgtccctcccctgggaagcctggcagaaacctgagactgggcctccagttccaggtcgccactgggcccaggcctctcctgtccgcctgccagggactgcggaacaggtaactcctgcgccaccctaaacccacctggcctgttgctccaggtgcggcctggaggccccggggcctgcacacctggtcagctcagaggccaggaagaggagcggagggaggggtggggccgccggccgctgctggtttcgttttgagccgggccccttcttcctccctccctcccactcctcgccagacccctgcattctgggaaaggctgtgacaacttcctctgaactctccttaacctgccctggagcccagggcctccaggaggctgagttccgcctgcgggacctgaggcttcctgcaggtcacacacctccacccctggccacgtggccctagaccgcccaccttctagaagcttctttatgtgctgccccatcatgtccccaccccgggtgcagctgtcccctgcctgcaccccctccaccctgtgtcccagactctgcacacaggaaaccgccctggccccagggagggctgcctgagacccccgcctccaacctgcactggggacatctgggctggatggtcctcgggaggtggggctgccttgggcactgcagggtgctgggtgacatctctggcctccatccattccatggcaggggcaccccctgtctcgacaaccacagacgtctgggagtttccaagcctcccctgggtggggggacagaattgttcctgctaagatccagtggattaaaagacatctgtgaggggacagaaatgactgagttttgtgccggccggtcaggcagtccctggcagacaaaattcccaagtatttgcatccaaaaaaacaaaacaaaacaaaacaaaacaaaaccacccagcgtggtggctcacacctgtcatcctagcactttgggaggccaaggcggtcagatcattgaagtcaggggttcgagaccagcctggccaacatggtgaaaccctgtctctactaaaaatacaaaaattagccgggtgtggtggcacatgcctgtaatcccagctactcgggagactgaggcaggagaatcgcttgaacccgggaggtggaggttgtggtgagccgagatcacgccactgcactccagcctgggcagcaaagcgagactccatctcaaaaaaaaaaaaaaaaagagagaaaaacctaaatatttcatattgattccaaggtgaaacgggaatattttggctctgctgggtgaaatatactatcaaatcatctgttcttttcctctattttgtttattaatatttatttatttatttatttattgagatggagtctgtctccctctgttgccaggctggaatgcaggggcgcggggtggaacaggtaactcctgcgcccctgcctcagcctcccaagtagttgggattacaggtgcccacaaccatgcccagctaatttttgtattttttgtagagatgggctttcatcatgttggccaggctggtcttgaactcttaacctcaggtgatcacccaccttggcctcccaaagtgctgggattacaggcatgagcccctgcaccagaacggtatttattttttttgagacagagtctcgctctgtcacccaggctggagggcagtggcatgatattggctcactgcagcctccgtctcctgggtttaagtgaacaggccggctaatttttgtttgtttgtttgttttgagacagagtgttgctctgtcgcccaagctggagggcagtggcacgatcttggctcactgcagccttcctctcctgggtttaagtgaacacgctggctaatttatgtttgcttgagatggagtctcgctctgttgcccaggctggagtgcagtggcatgatctcagctcactgcaagctccacctcccaggttcaagggattctcctgcctcagcctccctagtagctgggattacaggcgcccgccaccatgcctggctaatttttgtatttttagtagagatgggatttcaccatgttgcccaggctggtctcgaactcctgacctcaagtgatcctcccgccttggcctcccaatgtgctgggattataggcgtgggccactgtgcccagccctttctatttaaaatgttttaacagggaaatcctgctaaaactgggaaatgtacatttcgtctggggtgcaatgtgcacattgggttggggtggcagggatggggacaggacggggacgctatggcgtggtgccccgcgtggaatctcaccctctgggcggctggttgcttctccggcctcatttcatttgatgacctttccacttgccccaccccgaggcggttgttgcaggaggagaaggaagtatgtgcctgtcccagggccggcctgggtcccacctggggagaattccacaggatgaagcgagcaggcagtcgcctgtgaccccagcttcataaatcaaatatgttagcaaatcctgcccggcacacagcctggggcacttgcatggagccagtgactttttggtgtgtccggggacagactgcactatggagagggatgtcagggctgcccatgctctccggaggcagaagccagcacatatgagcaagtcaagcgctgtttatttacgatgaaaataccaagctggggggtgggcgtggtggctcacgcctgtaacctcagcactttgggaggccgaggcgggtggacggcttgaggtcaggagtttgagaccagcctgggcaacatggtgaaaccctgtctctactaaaacacaaaaattagctgggtgtggtgggcacctgtagtcccagctactcgggaggctgacacacaagaatcagttgaaccgggaggtgaaggttgcagtgagctgagattatgccactgcactccaggctgggcgacagagcaatactctgtctggaaaaaaaaataccgagctgggaaaacagccgacaaaacactgtaggagtcttcttggggccacaggtggtgtgccccaggtccacgtgggcctcagacatgggggcagggctatcatgttgtcgagaagtttttttttttttttttgagacagagtcttgctctgtcgcccaggctggagtgcagtggcgcgatctcggctcactgcaacctccgcctcccgggttcaagcgattctcctgcctcagcatcctgagtagctgggaccacaggcgtgctaccatgcctggctaatttttgtatttttagtagagacagggtttcaccatgttggccaggctggtctcgaacttctgacctcgtgatccgcccctcttggcctcccaaagtgctgggattacaggcataagccaccgcttccggcctatctggaggtttttaataaccacagaaaacctcaacacgtctgtgtaaaaccttccaatgtcaaggagtgagctgccccagggccccccaaggcctggctttcagtgacactcccttcaccctaaagccccgcaaacgttatttattatttattttttattatttttttgagacggagtctcgctgtctcgcccagcctggagtgcactgacacagtctcagctcactgtaagctccgcctcccaggttcacgccattctcctgcctcaccctccccagtagctgggactactggcatccaccaccaagctcgactaacttttttttgtatttttagtagagacagggtttcgccgtgttggccgggctggtcttgaactcctgacctcaggtgatctgcccaccttggtctcaaagtcctgggattataggcgtgagccacccagcccatgccctgcaaattttaaaatgctgcatgttttacaggaaagggtctggccccgggaggcagggaaatcctaccccctggactgcagcatgtccgtggccagggcaaaaaggggcatccccaggtgtgtagccacctttgggagcacccgggatcccttcccaggcctccacagtggagaaaatgaggcaacgagtccaaaggacagcaggcaggagggggatctcggatgaggcggcggctgggtctgggaggtttcttgggggagcaggagttgagagatctagaaaccgccagggtggacgcactcttgccacatctacaaagtagtttctagaagtctgaccctgaagcgaggcagggaagataggcaagaccacggcttctctcccgtccttccctctggggtgccgtggggctccaatgaagctgcaggatggctgcgcacaccgcagggatcctggcgcggggtccatccccacctagcccagactgcccctgctcccctgggactccgtgtcctttcattccttgccaatggcagggggtggccgggaccctggggtttccaggaccggccgaggtcccgccggtttggagcacaggcagccaacacattccccccggccctcccggcaatcctgagggtcctggttacccacagggcggcaccttcaacacttttttttttctcctattttttattttttggggccacactccgtcgcccaggctggagtgtgatggtgagatcttggctcactgcaacctccacctccccaggctcaggtgattctcctgcctcagcctcctgagtagctgggactacagttgtgcactaccatgcccggccaatttttttttttttttttttttttttttgtagagatagggttttactatgttgctcgggctggtcttgaactcctgggctcaagtgatcttcttgcctcggactcccgaagtgtttagattacaggtgtaagccaccaagcctggcttttttttttttttttttaagtcatgtgagactttagggcaaaacataaaggagagcagcctggggagctgtttgcaggaggtgtcaactcatctcttctttggtgtctgcagaaaaaaaaaaaaaaaaaaagccacacaagactagaagggtcaccctaagaagaaaaggacaatccagcagttcccacagaaccacaagcccccaccttctgctttgtttcctccagaaacacagttgccagccacccttcccctacaattcgcccgcagataatatcagcttgctggtagtctccaggaagtactgaagggggaggctcacagcctcaagagctttagagagctcagagggaccctagaacagcccagctgcccaccacacctagcccagaggtggcctcctctatccgagcacacagtcccgaaggtagaaaggctgggctttggatctcggacaaccggagaagcaggcgatgggcctccgggaaccccgaagaccccaggacaagccctcaccgtttcatctgcagcccactgcggcggaacagttcaaaggcccgaaagtgtcacatgccctggtggtcacttctgatttgttgggcgaggagaggtgacagaaccacccgccctgggctgggcctgctgcggacgcagggggagtgcagggcgtgtctcgggacctgctggggtttccaaccaaaccgacagcttggaaagccagcgcttcctttctgtggggctgagtctcagctcagctgccactgctgggagcccccactccctgaagcggggggacagggagaggatggtgccacgctggggaagaggcaggggcggccttcccgcggaggctacgtgacaggagcagtgtagaggaagtggtttccatcacggaaggccgaagctctgccttccacaggggcagagatggtggcggggaggacacagagggaaaccaggtggcatttcccttcttttttttcagtagccttgctctgtcacccatgccggagcgcactggcaccatcgaggttcactgcagcctcaatcccctgggttcaagcgatcctcccgccttaggctcccaaagcactggaatgacaggcatgagccgccgcccccagcctcactctccttccttttggtgagagccgccatcgcctgggggctcactgcaggtcttcatcccttgacccaaagggagaggcgagctctccctaagggagggccctgcgccctccagcctcggcgcccggcgatgcgggtcagctcagggatgtcctctccgtgctgggctgaagcaaagcccagcacccaacgccgaacggaagaaagaagcaggatggcgcggtttgctttttctctccctgttttgttttgtaacctaaggaagcagagcctctgagaccacacacagcagcgtcgcccgtccccagaggcaccccggccaggacgggcaggagaggagacccccgttcctgcatgcgctgtcgccccgccacggtgctctccgcaggggtgaggcaggagggtgggtggaggcgccagcctgtcctcagctggaagggcggggcatggacagggacggtgggcaggtcaccagcgggacgcagggagcccggccactgtcacacggcggtgcgcgtgggtgtgccgggctggttcagccgcagggttttacacaaccagccggcaaaatccacttcttccacctcggaccgcttgatgaaggtgtggttctgcaaggaaaggggagccgtgagcacccgggcctggagtcacagtaggacggggagggccagcgtctgcccagccctggcagatggtacgggacagaaagcaaaaaacagaggagaccctcccttccccacaggaagacgcactcggggtaggagagggaaagaaacccagaaaggggcagcggcgtgtgccaggcctgggaggggtctcaggatgctgcactccacctggggcggggacaccaccagcacggcagcctgcgctcccaggggagggtctacgctcgcgcaagcccagggtcctccggccgctgtggacaccggggccggatcattctctggcgtggggccatcctgggtactgcagggtactgagcagcgtccctggcctccacccactccatgccaggggcttccccaagtcgtgacaccacaatgtcctcagccattgccagggtcccccggagcaggacagcccaggcaagaacgggctgttccacagaactccgcgaagagcattgtacaggcaccgtcccactcgccagcacatgaggctccagagcccctggactgtggctcccatggcttgagaacaaaagcctcaattttatttcagtttaacaaattaattaaatacttttactttaattttttttttttttagatggagtttcactcttgttgcccaggctggagtgcagtggtgtgatcttagctcactgcaacctccgcctcccgggttcaagcgattctcctgcctcaccctccccagtagctgggattacaggcatgtgccaccacacccagctaatttttgtatttttagtagagacggggattcaccatgttggccaggttggtctcgaactcctgaactcaaatgatcctcctgcctcagcttcccgaagtgctgggattataggtgtgagccaccgcaactggccttaatttttattttttgagacagtcttgctctgtcgcacaggctggagtgcagtggtatgatctcagctcactgtaacctctgcctcccaggttcaagcaattctcccgcctcagcctcccaagtagctgggattacaggtgcgtgctaccatgcccagctaatttttgtatttttagttgagaccgggtttttccatgttgcccaggctggtctcgaaatcctgtcctcaaatgatccgctcacctcggcctcccaaagtaccgggattacaggtgtgagccactgtgcccggccccactgaacacacttcaacagccacgtgtgaccagcggttcctgtacaggacagcacaacatgagaagcctcttggttggaagggctgggggaggagggcgggtgcccttggggaagaggctgtgctgggccaccccacagtgggtgagtagaggcctttggggttcccaggagggtggtgtccaggaccttgggcccctgaatgctgcctcttttgcagctggaggcaggccaaggtgcctatcttcctaaaagtcggtgtaggtatgggtgaaaaaccaaccaacttgataggacacatcttggctaggtccaggatacccaacaggggagcatttttaagaagctggttcaaaaatggctatttcagccaggcccagtggctcatgcttataatctcagcactctgggagacctaggtgggtggatcacaagttcgagactggcctggtcaacatggtgaaaccccatctctactaaaaacacaaaaattagccgggtgtggtggcacgagcctgtaatcccagctactcgagaggctgaggcaggagaaccgcttgaacctggaagatggagtttgcagtgagccgagattgcgccactgcactccagcctgggcaacagagcaagactccgtctgagggaaaaaaaaagttatttcaacattagtacccctctctttttagttatttatttattttggagaggcacagtctcaccatgttgcccaggctggccttgaactcctggcctcagagagccatccccctatggcactaggattccaagtgcccaccacaatgcccagcctgcctcattaaaaaagaaaaaaagtcacacatgccaggtgcagtggctcacacctgtaatcccagccctctgggaggccaaggtgggagaatcatttgagcccaggagtttgagaccagcctggacaattagcaagaccctgtctctataaaaaaaactagctgggcaggtcgggcacggtggctcacgcctgtaatcccagcactttgcgaggctgaggcaggcagatcacctgaggtcaggagttcgagaccagcctggccaacacggggaaaccccatctctactaaaaatacaaaaattagctgggcgtggtggcagccacctgtaatcccagctacttaggaggctgaggaggctaagacaggagaattccctgaacctgggaggcggaggttgcagtgagccgagatcgtaccactgcactccaacctgggtgacaagagtgagacttcatctttgcggggaaaaacaaaacccacacacaaaaactagctgggcttggtggcacacatcggtagccccagctgctcaggaggctgagtgggaggatcacttgagcacgggagttggggctacagtgagctacaatcgcaccactgcattccagcctgggggacagagcaaggctgtatctcaaaaatttttttgaccaggtgcggtggctcacatctgtaatctctgcactttgggaggctgaggcaggtggatcacctgaggtcaggagtttgaggccagcctggacaacatggtgaaagcctgtttctactaaaaatacaaaaattagccgggtgtggtggcgggtgcctgtaatcgtagctacctgggaggctgactggagaattgtgtgagcctgggaggctgagactgcagtgagctgagattgcttcactgcactccagtctgggcgacagagtgagactctgtccgactctcaagaaaaaaacaaaactgaaagccacattccagtattagaaggcacccggttgggtgtctgtagctggcatctcttcttttcttacaggcacagaaagtaacgggctgtctaggggggtggcatctccaatccgccaatcagctgtcgaggggtttgaaggtcgctgacggtggctgtggtatgggaaagcactcgggatgcaggctgggctgagggcaggaggatgatgcccggggccctcctctgagggtgtagtccccgctggggaggcgagttttggtgaacagctgggcttccgaggatatcagaggatgggggtttaaggggacaccgaagtacgcacggcctcgggggacctgcttgccagtgtgcagaacagggatggtcaccctctagtttgcagggaaaggagcctggggggctgagagctgcctccagcctctcatgagggcaaagaagcccggggtctcatcctgtgggtgcgggaccagcaccaggcaggagcggcggagctcagagcccagagctgttcccacgcacacaccctctgctccccgcagccagcccaggatggcttctctcatggatgagagagacccacagagggtcctcggcgtggcctggcacacccggcctgcccacatcctggtcgcaggtgctggctccccgggcagggccaggcccagcagccttatttcctggggcctgggtggcagcctgcaccctcccggtcccagaacccgctggcatcactcactgtgagcatcttcaggtccgcccgctccgctgggttcttgatgaggctgggggttccaagaggcaggaccgggaggcggtggaggagacaagacagggcagtcagctggtggccccggggcacccgcgtgtgggccgtggtcggagggggcctggatctctccgaccagagagagtggcacagagtggctgctctgttctgcctcctggcagaggacgagggatccacctctgcactttggtgccaggggcaggacaccccccagcgggagggtgagagggaaagagggtgggaaaccccgcctggtgggtcagaagcctggacgcaaccccagctaactgtctaataaaaccccaggcccggggcaacatcgccggagcgcacgccaagggcccggggcaactccggcaccaggagtgcggtgccgttccacggcgtcccgagctcacacacatggaccggccctgtgggcagcggggtgtccgcagctccttccccgtggtctgcggcacatgcctgtgaagcccacgccacaggtgctgctgggtgcttgggggcaggagaatggagtggggctggcgaccctcccagaacctgcgggcggatcccggggagcccacagtcagcacaccaggggtccggggaccagacagaggcttctcctgctgcagacagtgagctggggacaccgtcatgtgcacagggcctgcaatcctgcttcacccctgggctcacggacaggatggcatggcagccgggagctgcagccccacagctctgggaaaaggaatctggcttcccgttgggctgagtcctgcctaacgctgcactgggattctggatgggcaggctgggccacgggccccacccaggacccggaaggagtggcacatctgggtcccggccaggggtgtgggcagcccggctccacctaccatttattgacaaactcctggaagtcgggggtgaacacaccgttgggcagcttaggaggtggctgtggaggagaacagagggtggggtcagccctgggcatcgtcagggaccctcggctgcagccctctctacccctcactgtcctgtccggtcacccaccctgcaggcctggccgacaccacatgccaactgggctgcaccctgtcagaggtggccttctcccgaaagctctcgtttgagagtcacggctgcttagagggaaagagtggggtgcgtcccccttttatcaacaggacaacctctcgagtgtcgtcacttgcttccttccccagtgtcactggctgaaggatgagctttgggactgggccccacagagggacatctggatccaaagttattttgttttgagacagtctcgctctgttgcccaggctggagtgcaatggcgtgatcttggctcactgcagcctccacctccggggttcaagggattctccagcctcagcctcctgagtagctgggatgacaggtgcccaccactgcgcctggctaatttttatatttttagtagagacggtatttcaccaggttggccaggctggtctcgaactcctgacctcaggtgatccacccactgtggcctcccaaagtgctggaattacacacctgagccaccgtgcccggccaaactgggtccacagttttaagcccaagcactggggagcctggcctgacacacgtccccggagcgggagtggccgtgtaagcggtgccagcagggcaggggcaggcctttcccgcgcaggggcaggggcgggaagaggcgggggagaggtcgggggatgtgctcactgggcatgggtgtggctgctaggtgcagggagagctgggtcaccagggccaccccacctggctccgtcatcatctcgccacccaaccccaggcctagcccagtctgcaggcagctcaaatgcccgtttctctgccccagctccaaagggccaccaaagacacagaaacccacagaaggcccagggaggtggcccggcctggtcacgtggccaacaggaccttggggtgcagtcctgtgcctccctgacagctgcaggcctggaaggaggccgcgtccctccttgtgccttgttttactcatctgggcggtggaaaccctcatactgtggctcactgggttgttatggggactgacggagcaggagccaccccgggacctacaggtccttctaggctctctgggcctccttccaagaggcaagggccattcctgtacctttctccgtggaagcggggtgatttatgagtccacgcccacgggcgccaggacgctctgatgcagagacactgggccactgctcaaggggcaggctggctcctcggcctgagcccagggctgctggcacacacctccctctggactcagggtgagaggctgcggtgggaattctgggttcgtcttcataaaaaaacaatgcccttgggaaggagctgggcttgtgcagcacagtagaagatgggagacgcgacacacgtggaattggttcaagaattgcttgaacctgggaggcggaggttgcagtgagctgagatcaagccactgcactacaaagctagacaatgtctcaaaaaaaaaaaaaaaaattagctgggtgtggtggtgcgcacctgtaatcccagctactcgggaggctgaggcacgagaatcacatgagcttggaaagtggaggtttcagtgagccgagaaggcaccactgtactccagccttggtgactcttgctctggtcagagagagactctgcctaaaaaaaaaaaaaaaaaaaaaaagaaagaagaaagaaaaggaaaagaaaagccaaaaggcatcaagcacaaacctcgttcacaatatagtccaggagttcaaagatggccatggcaggccggctatccatcccgtgacctgcacagggagagagatggaggtgagatgggccgatggccacctcacttctgctgggggttgggctcccagggggctgatcaccaccaggcgccctcctccacatgccagcctaaattggaggcgggtgtgcagaggcactggacaaagctcccctgcctgactctgggttccattccctgggacagctactccttgcctgagcctctagtgaattaaaaaaaaggcaaaaggaacaagaacattttttgagaagtcacacatttggctcggtgaggcttgccggacgtgccaaagtcatcacccctcctctctggagggcagggggagggacggtgctgaccgcaggcaaggacagccgcgtgaccttgcatggagctgctggcggtgatgggggcaggccccaagtgccactcaggacgggagactggctaggggtggctgacccctgtctgagaaccagctggccaggcctgggcttggcagctggactttcgccttctgcccgtcctgaaatgggcaggtgggctggggccctgggctggggatggtataccacctgagagttgggactgggagaggctgaggctaggcctgaggataaggacttgggggcctctccctgggatgagatcaagacatcccagcagtctggctggagaggaggaggtgggcttgccagtgctatgaaaatctccttctcacagccccaatccatccgggtaggaccacaaaacgtggcctgttcgtgtcataaaatactactcagcctttcaaaaggacccaggctctgacacgcaccatggcgtggatgacccttgaggacactgcgctccaggagagaagccacacacaaaacacagaaggccacacaagtgtgtgaccccatttctgtgaaatgcccaggacaggccagtccagaggcaggaaggggatggagagtgacagctgatggggacagggtttcctcttggggagctgagaaggttctggaattagaggtgatggggcgcagcactgtgactgaaaaccactgaactgctcacctgaaatgagttgtggggtgtgtgctttgtagttcggaaacatggttttaaaaccaaccacagtccgctacagggtcctttggggtctgacgccaccaactctccctgatgtctgactttaaaaaaaatcacaggaccctcctgtgattctgcaccaagcagggtccgcccccggctcttccctcaggcggtggaagtgtccgctcggccctctctgactggcgtcagggagctcccgctcccgaggtgcccgccctaagtgccggattgtcctctgcgagcccagctgtccctggggcctgagccctcccgccccctcccgggctgtgtcccctcctgtgtgtgttggggccggagccaacaggccactgagggccatgccaagtccaatctccacttcaggactccctggaaggcttggcccgcagcacaggagcgtgtcacctgcagaatgcaggctctgtggcggccaattccttccacttttctgtgcgtttgaatgctttcgggataaaatgttggaaaatccaactgcccaggggcttggtggcaaagctgcgctcccagatccctccagctggcaacaacaggtgcagctgccccggacagaacaggtttggggtgctcactgcttccagctctgtccccggaaaccccaggaccatgggaggactgctgaccacagtcggcaccatccagggggacaggtggtgcgccaggggcagaggggaggcagctgctgaccctggcacagcaggccccgcgcagggcactgcgcgtccagaccggaagttgcagattcaggccgtaccgctgacggggcgcccggggggcctcggccgaggcgagatgctgtgaggctctccttcttccccgtcgaccacgggccggccaaagatggcctccagctctttggcgtcgggcggggggatggggtaccttccgacggccagctccaccagggacaggcccatgctccagatgtccgactgcaccgagtaatgtgtgccctgcaaccgctccggctgcagcagagccagggaggaaagagcccagaggggcgaggatggcagctggaacccgggaggcttgccccgttacagcccccgtcaccctctccatggctaatgaccgcagcaatggatagagagctgttacgcaattctacctcccggctcacccacccagggcctccctgcggcacttgctgaagaggcttccagcccgaggcctggagctggtgttgaccgcagctcttgaagagcctgcaatgctcagcacttttgggaatggatgatgggccccaggaagcaggggcctcctcctccacagctaacatctcagaggctgctccaaggctcaatttggcaggttgctgaatccccagtcgtttcctgaaagaccccagattccaattccttggtccagaaattaactaagggccgggtgcagtggcccatgcctgtaatcccagcactttgggaggttgaggtggaagcccaggagttaagactaggctagccaatatggcgagaccccatctctactaaaaacatttttttaaaagttagccaaggctgccgggcacggtggctcacgcctgtaatcccagcactttgggaggccgaggcgggcggatcacaaggtcagattgagaccatcctggctgacatggtgaaaccctgtctctactaaaaacacaaaaaattagccgggcgtggtggcgagcgcctgtagtcccagctactcgggaggctgaggcaggagaatggtgtgaatccgggaggcggagcttgcagtgagcggagatggcgccactgcactccagcctgggtgagagtgtgagactgtgtctcaaaaaacaacaacaacaacaaaaacaaaaaccaaattacccagctgtggtggcacatgcctgtagccccagctgcttggaaggctgaggcaggagaattgctcccgggtgggaggcggaggttgcaatgagccaagattgtgccattgcactccagcctgggtgacagagcaagactctgtctcaaaaaaaaaaaaaaaaaaaaaaaaaagaaagaaacctggtaggcactgctagagacaaaaacctaagagagaattccaacaggaaggggagatctggccgggcgtggtggctcaggctcactgctagtggaatcccagcactttgggaggctgaggaaagaaggtcacttgagtccaggagttcatgagcagcctgggcaatacagcgagaccccgtgtctacaaaagattagtaaattaacaaataaaaaataaagagcaaggggaatccgaaaagcaggctcccaggaggcaccagctttagacgtgccttgtggcaagtggggagagctgatgaaggggagggtgcagctggggtgggactgtcccgggggtgctaacagccatgtaggagtgtgtgcccacgaaatagttgggaaagcctcgtgggaggcggggagagctgcgcaggagaactgggagggacagctgcgcaggagacatgggggtgagagctgagggggagagctggctggcagagctgggtggggagagcttgggggagagcagcagggaggagagctggaggggagagccagcggggactcacagccatgtaggagcgcgtgcccacgaaggagttggccatggagtcgatgagctggccgctcaccccgaagtcacacagcttgatctcccctctagagttcacgaggatgttggagggcttcacatctggaggcggcaggctgcgggtgaggggcgcccaacagttgcctgccggcccccggggctctggggagggcgggctgggccttacctcggtgcatgatctggtgcttctctcggaggtacgccaagccccggagaacctgcaggggagcgcggagggagtcacgggacaaggccaccagggcttagctcctgaccgagcccgggggtcagagctgagcagtcagagctggagcgagggagctgcggcaggaaccatttcaggctgtgaggagctcgctggggtggagcaagcgaggccagagacgagacagtgctgacagccctgtgctggcgtgtgcaagtcaaccccggttcccatggccgcagtgccgccgatgccactactgcctttgattcagagcacacggcttagccccagggaagctgagatggtggcccatggcccgggagtaggctgggctgccgagtttgcccacatcagcctgaaaggcagcatctggggtcccagggactgtgctaagggcccccagatgggacgggctaagggtgcctgggaaggacgatgtttcccccaggcccgccctggaagcagcatcccgagaagtgaagcaagcagcacaggcagtgtgacggcagctttcaactcggaaacgcgtgtctggcagcatgcgtcctgtgtcttaatccaacactggtatgggcaggcgggactcggcccctgctatggacaaggtgcaagctccaagaagcaacacgcacggtctgctgaaaccacacggctctacggagcagctgtgctggagaccgggcagcagagacgcccttggccccggtgacatttctaacagcaatggtgagtgtgtctggaggtcctggcgtcccacatcccaccccagagtctccctttcaacaagctcctgtcccctgcaacgtgccagctgccaacatccccctgccacgaggggcagaggggaccagtgtggcaaacagaggatactaagagtgaagagggacctataacgtcttcacttggcagatggtgacctcaggccccaaaagggacgtcacttgttcaagctccacagcaggtgggcacagccttggccactctctttctgcaggggccaccctaacccccaccacactgtgagtggctcccggaaccctggccgtgtggaagaggtccgtgcagagtgcggtgggggcgcgatgtgggtctgcggtggactcaccgcgatgctgactttccccaggatctcctcgggaatcctcttggcctctttcagcacctggtccagggagccgccgtcctagagggcacacaaggagtgagtgcaggctctgcgcaggtggccgggaagccacggatgcgtccccccactcccggcgagggggtggtctgcctcctgacgggaagcaggggccggagcccaactccacccacgggccaagggcagggcgtcttctgacagttctgcctttgggtctgaacacccacccacaaggtggggaaggaacagggcccagggttcccccgcctcccgtcccatcctcgaatcagttgcgtgactcggccctcctgaggtcgccacggcagaggctctgctccgggccagcccaagccgcggccgggggctcaggcagctgtggggcccgcactccctgcagcctacgtggtgggcttgtctgtgcgccacgggaggcggccaggctggagaccagcgtcttgggcctgcgtcctcttcccagcacacgaagggaaggggagggtgagggcgcggaggagacgcgggtgctgccccgcgtgggaggaggcggcgggtcgctgtgtgcccgtccagacccccagggggctccctcgccaagccctgcggctccactgctgggcgtctgccctgcgcctgtccctgccacctagggcagaaaggccaggccgagtaggaccaggggccagggggtgcatggactgcaggagggatcccagtgacgccagcccaggtgacggtaacctcggcccctccccacagcctgtggtctcctcgccactgtgccgggcatcctgcggagggcctggaaacgagtcatcatgggtaggctggtccccgggtgtggccccacatccatgtcataaatgatgaaacagaaattccatgtcttgcccaaggctgcctggcaacaaacctggggaccaaaacccccaaatgccaaaaccccaggcactgggagccacccaaggtgcctcttcagaggcagaggctccggacacacctgccaggccacccccaggacagcaggggtgacaggccaagttcccactgccaccgtctggcgtgcgtctcttctgtgctcagcagagaggaaagtggaactgaggctagagagggcgggctggaggagcctggagaggctggctggggagcctggatttccccaccatgctgctccaggactcctgcaaaagcccagccttccctgggatggctttcattcacatgggtgggaggagccgggggagaaatcctgggactcaggggtgcccgggttgccgctctctggccacttctgcccagctaggcttggagagaaaggccgaaggcagttctagaaaacccaacacgctttgagacctctaaagcatacacgtgactccatccaccagctccaggctgaagacgcagacacacagggtgagagggcaggtatggccagggctcagacagcccaggaggaggtgccaggacgggagctccagtgagccagggccaggtggaagctgcttctattctcagtttttatcaatctaccttaaaagaattacttaaaatgaggccggacatgggctgggagcggtgactcacgcctgtaatgccaggactttgggaggctgaggcaggcggatcacttgaggtcaggagtttgagaccagcctggccaatatggtaaaaccccatctccactaaaaataaaaaaaattagctgggcgtggtggtggatgcctgtaatctcagctactcgggaggctgaggcaggaagatcacttgaacctgggaggcagaggttgctgtgagtcgagatcgtgccacttctctctcgcctgggcgagagagcaagactcctcaattaaaaaaaaaaaaaaaaaaagccgcacgtggtggcgcacacctataatcctaccactttgggaggccaaagcaaaaagaatgcttgagctgaggagtttgagaccatcccgagccacacagtgagaccccataccaaaatcagccgggcgtggtggtgcacgcctgtagtcccagctactcagaaggctgaggtgggaggatcccttgaacctgggaggtcaaggttgcagtgagccgagatcacaccactgcactccagcctgggtgacagagcaagaccctgtctcaaaaaaacaaaaaccagaaagagaccaacgactcgaaagaggcagggtggcgaaaaccaaacagacgcaccaaacgcaaccctaaaacccctgctccccagcacagctccttccgtcttcgtttctcctggggccgcaatcaatgtttgtttagtgagaaaattcaaagagcctctccccggagatgagggcgggcggagcgctgtgctgcagcctcaggagctggtggaagacgcctcacaggagcatcgctctctctgcagccgcctttctccactgtgacatcggggccaggtcactctctggggtggggccgacctgggcactgcagggcgctgagtagcgtccctggcctccatccactccacgccaggagcatcccccagttgtgacaaccacacacatccccagacagtgccaggtgtctcctgggagggagaactgcccctggttgagaagggctgatctccagctataaagaccaaagtctggcagggtaagcaatttgtctgagtcacagagacaggatgtggtgcagggggtattgcagctgtgtactgctgaccccaaatctcactctgtgcatgaccatacacgtctaccgtgtgtgtgtgtgtgtgtgtgtgtgtgtgtgtgtgtgtgtgtgtgtgtgatgtttaaaatggtcttgtaactgtaattttgttacgtaggtagtaggtgaacacatttttctttctttttttttttttcctgaggcggagtctcgctctgttgcccaggcgggggtgcagtggcaccatctcggctcactgcaagctccgcctcccgggttcacgccattctcctgcctcagcctcctgagtagctgggactacaggtgcccgccaccacactcggctaattttttgtatttttagtagagatggggtttcactactggtgttagccaggatggtctcgatctcctgacctcgtgatccgcccgcctcggcctcccaaagtgctgggattacaggcttgagccaccgcacccggcaaacacatttttcttataaaaaattcaaatgaggataaataacctggacgccgcatcacttccaccattcccccctcaagtgtgacttatattgttccagatctttcttcatctctctctttctttctttcaggcaggggtcgcccagactgcagcatagtgctgtgatcttggctcactgcagcctccacctccttggttcaggcagtcctcccacctcagcttcccaagtagctgggagtacaggcgcgccaccatgtcctgctaattttttgtagagacgggggttcctcatgttgcccaggctgctctcgaagtcctggctgaagaggtcctcccacttcagcctcccaaagtgctgggatcacaggagtgagcacctggcccccgcatcttgctgtgtatttggaaacacagactcgggactcactctcttgcccaggctgtagagcagtggctcaatcatagctcactgcagcctcgacctactgggctcatgggattctcccaaagcactgggattaaagcatgcttgcccagccagagtttaaaacaacatcgaaatgggctcatgtctgtaatcccagcactttgggaggccgaggcaggagggtcacttgtggccaggagttcaagaccagtctgggcaatatggagagaccctatctctacacaaataagcaaataaattagctgtgcatggtggctcacgcctgtggtctcaactactcgggaggctgacgtgggaggacagcaccagtacactccaggctggacaactgagcaagaccctgacttgaaaatacaataaacaaatgaatgggccaatgctatgtttattttatttttcttttattttgaaatggagtcttgctgtcgccaggctggagtgcagtggcatgatctcggctcactgcaacctccgcctcccgggtgcatgtgattctcctgcctcagcctcctgaggagctgggactacaggcgtgcgccaccatgcccagctaattttgtatttttagtatagatggggtttcaccatgttggccaggatggtcttgaactcttgacctcgtgatccgcctgccttggcctcccaaagtgctaggattacaaacgtgagccactgcacccagcccatgctatgtttattttctacaaccacccctccactacatgaatagtgttgtactgtggggatactcccattcagtacaccattgtggatttcactttgccactgcaaagcagccaaatatcattctttaatcactcccttactgatggacatgtccagtttccattacagtagaacaagacgggcattcttcagcagataggacgagacccccagaaaggccaaggggcacctctacgaggtccgtaagccactggctctcctttccccatcccatgaggccccactgtccactgggttcttgccccgagttatccagtaataggttcagaccccagggaagcagccagccccactgttcctaagttccagtcaccaacaagtgcttgccattttatataaatacatcactgggcacggtggctcacccctgtaatcccagcactttgggaggctgaggcgggagaatcgtttgagcccaggagttcaagattagcctgggaaacatagtgccatcccatatctacaaaaaaacttgccgggcgcggtggctcacgcctgtaatcccagcacttttgggaggcagaggcaggcggatcacgaggtcaggagatcgagaccatcctggctaacacagcgaaaccccgtctctactaaaaatacaaaaaattagccggctgtggtggcgggcgcctgtagtcccagctactcgggaggctgaggcgggagaatggcgtgaacctgggaggtggagcttgcagtgagccaagattgtgccactgcactccagcctgggcgacagagctagactccgtctcaaaaaaaaaaaaaaaaaaaaaaacaaacttaaaaagctactcaagcgtgctggtgcacctgtagtcccggctacctggaaggttgaggcaggaggatcgtttgagcccaagaggtggaggctgcagtgagctaggatcatgccactgcactccaacctgggtgacagagagagaccttgtaccccctaccccccacaaaaaaagaaggaaaaaaatgcaaaataaagatgacatagaaatatgaggaaacagcgtagaaatacagggaaatggctgcagcagccaggacatggatgcaacacctgtgcgtgccgggtgccatcctgggaggagctcacacagtcctcaccccagcagggactacgacctccctcagcttcacagcagaagcggcaagagtcctgtcccgaacccgtggtaagggtgagcggtggggccgagacctgacccggacgcccatcctcagccccggtgctaagctgcccctttgcctcactggggtggcctgggagggaatgaatcaggtgctgggcaggcccttccatggaaacctatgggcactcaggtgaattccgagagcatcgttcagcatggagagaattcacagggccggcgaggatggcagggatggcccccttggatgactttacttccacggatgctgccctgtcagggctcacccaatgctttaaaaatcaacgtgctccacgttgtttttgtttgtttgtttgttttgagatggagtctcgctctgtggcccaggctggagtgcagtggcacgatctcagctcactgaaagctctgcctccagggttcacgccattcccctgcctcagcctcccaagtagctgggactacaggcacccgccaccatgcctggctaattttttttgtatttttttttttttttttagtagagacggggtttcaccacgttagccaagccagaatagtctcgatctcctgaactcgcctcggcctcccaaagtgctgggattacaggtgtgagccaccgcccctggctagaccacctcggaacttttaaagggtgcactccataacacagacagcacggcctgtgtctccctcctgcagcctggtggtctgtgtggtgtcccctggggtgccagcacccactctgggaacccccattttaaattcaccaagaatagaggttgggggcgggttgccacactgtcccctttctgcatgggaggaagggggctcgagaactgagtcagccacacaaaacgaggatggacagaactcctgagtagcgagggtgcctgccgggcgcgaggaggagggggaagacgaggaagacgaggaggaggaatagggagcaccacatgacagaggggctgcctcagaccacaaagcgcttcctcatcctttcctcgccctttgatgccgccggcaacgtgactctgcgagcagcggggcagacgccaggtctccctcgcaggcgggaaaggggctccaaggcgggtgctgccttgctcgggtcacatggctacgtgggggccttgctcaaattcacttcctgccttcattacaaaactgtcaaaggggatcgcacgtttgcagggtgtcacccaagcattctggttttgcaaacgacgctgtgcggcaggcggtctgatacctgatgagctcggtgtggcggggtcggcagcatttcctccggggttttgagctctggccacttctccttttgttccacccaatctcacccacttctgggcttcgaggccagagtgtcttaacaagggggcacgtcagagtcaatgaagggggtgcctgtaccccaccctagagactgtggtcccacagatctgagctgggggaggcacaggcctgccttgacaagctcagactgccacactttcctgagaaggccatttaaaaacagtcatcagctttgttatgttttgagacagcatctcgctctgctgcccgggctggagtgcagtggcgtgaccaaagctcactgtagcctcaacctcctgggctcaagtgatcttcccacctcagcctctcatgtagctggtgctatttttatccccatttttaaatgttgttaacaattttaaaacaggcacgtgccaccacactcacctaatattttaaattatagagatggtttctcactatgttgcccagcctggtatcgaactcctgggcttaaatgatcctcccacctcagcctcccaaaatggtaggattacaggcatgagccaccgtgcccggcctaatagggatcagtttttaattgcatctaccctggaacccagcaattccctcacacagcttacctcacaggtgtgcctgcgagtcagtgccatgttatttgagatagggcagagactggaaacaacctacgtaccccccaaaacgggagtgttttccctctctgctgtcataaggacgcccgggatacagcaagagaaaaagcaaagctgggaggaagacatgagtgcttaaaaaacaaaatcattggctgggcgcggtggctcacacctgtaatcccagcactttgggaagtcgaggcaggtggatcacctgaggtcaggagtttgagaccagcctggccaagatggtgaaaccctgtctctactaaaaatacaaaaattagccaggagtggtggcgggcgcctgtaatcccagctactcgggaggctgagtcagaagtatcacttgaatctgggaggtggaggttgcagtgagccgagattgtgccactactagattctagcctgagtgacagagtgagactgcctctcaaaaaaacaaaaagaaaacaaaacaaaaccaaaggcatctacatatacatacttgtatggcatcgactgccttgagaaggatcccctggaagccagcgcactgttgcctctgaggaaaggggccgtgagggggtcttccttctccccaacatgctctgttccgtggaggccctgcccctgcccctgccccggacgcactcaccatgtgttccatgcaaatgctgatctccccgtcactgtagaaggccccgtagaagcccacgatgtacggcgagttgcattcgtgcaggacctgcagctcgcggatgatctggttccggatggccggcttgatctcaaggtggatcagctgcaaggggagaggggcgagactggcttggggggtgcccgaaaacgggatgaaggcatttggggcctctgctctgcaggcgttcccaacagtggtcaagaccaactcagtaccccctccgcaattccacccctaggtgtctgcctagaagtggacacatacgtccacacagaaacgtgtcccaagtgctcacagcagcacgactcacagcaggcaagggtggaaagaacccaggcgtccacccagggcagaacaggccaacccagcgcagcccacccctcactgaaacaggactcagccgtaaagaggaaccaggccaagaccccggccacagcgtgggtgaaccctgaggatgtcatgcttagtgcgagatgccagacacaaaaggccacataatatgtgatcccatttctgtgaaatgtccaggacaggctgatccagagacaggaaggggatgtgtgggtgccgggggctggaggaggggatgggggtgactgctgatgtggacagggttctttttggggtgatggaatactgtaaaattgactgtggtgatgaggacgatgccgtgaatatcctacaatccactgagtcacatactttcaaaggggacactgtaaggtatgtgaattacacctcaataaacctgttttcaaaaaagaccaattaagcaaacacttaattcccactcagttgtagtgggagctgtgtgaaagcatttttccccatcaaatcagactttgacaaagtgcttgcctttcccaggagggaggcagggcaatggctcccctccaggcctctctccacttggggtgggtctatcccgagccccttcccaccctcaagctggagacaccccgtggagacgttagccacacagagccgcgggcgcccctgagaattctccctctccttcaacccaagttcaagacggcaggggaaattttcatcaagttgaccccggtgccactttaaaaaggcaagaagccaaagatccgctcaagagatgcagaaaggaggcctggtgtgtggctcacgcctgtaatcccgcactccgggaggctgaggtgggcggactgcttgaggtcaggagttcaagaccagccggaccaacatggtgaaaccccgtctctactaaaaatacaaatttagccgggtgtggtggcaggcgcctgtaatcccagctactcgggaggctgaggcaggagaatcacttgaacccaggaggcagaggttgcagtgagccgagatcgcaccattgcactccagcctgggggacaagagcgagactttgtctcaaaaaaacccccaaaaaaacaaaacaacaacaacaacaacaacaaaaacaccacgggcaacccctaaccccatggacaagccccagaagagccaggacccccagcatggcaaggagcagcctgaggctttgggacggcaccctggagaatcacagcatcccgctccagccactgcaataagacaagaaaaagacatggtttccactcatccgccacagaggcaaagccaggcccaggtgcagtcagtgaaggggcggccaagcacggagacagctccttcctggaggagacctggggtcaggacgggaacaggaatgggtaagaccacctcaatgtggcaaaaagtccaccaaggagaatcaacccaggtgcctggggagcagcaacaaggaggtgacactggggccgggccttgaggaaggacagagtcaccatgaggaggagatgggggagggtgttccaggcagagggacaaagagccgcctgtcagcgggcacggaggcatgaaggagccctcgctgtgttcagggcagcaggaggctgaccgtggccacagcacagggcgtgtgtggggagtggcccctgctctaggcctgtgaccttgagaagcatggcagggcccggggcacggtgcccacctccccccgcccggccgctcctcaggctaagcgtctcccaccttgaccgcagccctggcgctgcctgcccctgcctgcccgcccctgcctgcccctgtagcgctggcttctcccctcaggccagcctgcagaatccagctccagacggtggcccctgggctactccactccctcatggtgaccccacaggccccagggccaccccagcaccccaggatgctctcccctccagccaggctgtaactgagaggtgctggtgctcactcccgttgcacaagggcctggtactgaagcttggatgttcacgtggaggttgggagatttactggaaaaggccacatttgttttcacaccgagcccttgaagcttggtgcgtgttttccatgttcagcacgtccggactgaccgcattttaagagcccggtagccacatctgaacgggggctgctgtcttggacggctcagttcctgaccaaaaacttcaaaggagccacagatgggtgacaagaagcaggaaagagcgcgcgttcggctggccgtcgcaagtcgtaatttaggagaggaagtggcggatgggctactgggaggaatcccagaggccttggaacccaggagctccgaacgtgaaatgaggccgtcggaagcgagaggccttctggaaggctgtagtaaatagcagaggcgagggaggccagtctgcacagggcggctgcggcgtgatctcagttttaatggttctgtaatacctggggcctgtcgagcgagcattccagataaacgggcagccaccactgagggtgtgcaaggggaaaggcagacagacagacagatggacaggaggggagggggcgttcctgagcacctgcaccctctaaagttcaccctgacaagcccgggggatgggtgtactgccccactggtgctgactgagcaagctcaggttcggagcctcggagccatgttcccagtggcattagctgctaagtcaggactggggctgcctcggggaacactggagcccgtattctttccaggacaccacagcccaggccgtgccagctctaatagctgattaaatgtggatggtgtcagggtgttaaaactaaatgccagacctggctcggaggtggagacggttgctacagaagaatgaggaatttgagccaggggtggggttgggggattcggagtaggaaaagagaggaaagagcttcactgagtgtcagcgagagcaggaggggaagaggaggaccgagccgccccccggccgccaccccgcaggcctggaatgatctcagcaacctcgtaaatcatggatcagaaactgacagctcccaagctggatgtagccaagagtcacgtgcagcccacactgcgcttccaaacatcctgaattaggtgttgtcaaaaattggaagagagccggggcagtggctcacatctgtaattccagtgctttgggaggctgaggcgggaggatcgcttcaggccaggagttcaacactgggcagcgtagcaagccttcatctctacaagagattttaaaaattaacacacaggctgggagcggtggccagctaggggaccgcagtgcagtggatctggaggctcagccccggcagctgctcccaagtccgagcagatccaagagggttcgaatccgattcaggcactgaccccacacagcctcggtttcttcaactgtaaaacgaggctgctgttcaattttaatgagaacacgcgtcaaaggtgttggcagcggcttcgactcaggtcgtcacttgtgagacagcagctggtactgtgaggtggccttgggcaggccgtgtgaccgccaccctggaagtaagctacagcggagtggaggaactcagaggcgagaacaaacactctcatctctgctatgagcatggacaattcaaagaagccccacacgcgtaacaagcagcaagttcttcacctatctccctggcccaggtaacgcggggacgctgctccaatgggagaggggtcagaggccacggtcaagccaaaaagacatttacaaaccagcatgacctcaaataccgagactgggccaggcgcggtggctcacgcctgtaatcccagcaatctgggaggccaagatgcatggattccttgaggtcagatgtttgagaccagcctggccaacatggtgaaaccccgtctctactaaaaatacaaacattagccaggcatgccagccactcaggaggctaagggaggagaatcgcttgaacctgtgaggtggaggttgcagtgagccgagattgtgccactgcactccagtctgggtgacagagcgagactctgtctcaaaaaaataaataaataaaaataagtaaataaataagatgaaatgaaaggagcccttgcagccctacctgcatagcagccagagccgctgagcccacgagctcaatgcatcctctcccacccgagttttcgggcactttaaagaaaacctaattttgaaagaattatagaagcacaggaagttgcaaaaatagtaacgagagtcccgtgcgccctttccccgcctcccccaagatgactgacatcttacatgacggaaggacagtactgacacccagagctgatgctgggacatctccacccaccagaccacagaacctgcccagccacgcctgccctcaggttcaaaggccccgatctccctttccccgctacagtaaagctgcaggtgggcccggcttcacctgcgcctgtcagcaggagcaggagctgctgatacagcaagcattgggttcatgtccactgcccagcccatcagggaccactggaggctcccccagaagcctgagggtccctggcacacacgaggactggcactgtctcaaggccctgctgtggctgtgtgaaccacacgcttgcctttttccacccagtgcttcgggcggaggcggacctgagctttccaaggctgctccggtttggaagaggctgcctgcagtacggggacagaaatagcaagtccgcggctgcacacttcaggagggagggagggcagcactctagaggccagaagacagagctgcagagctaaatccccgcaggagttgagccgctgctcccgaggaaggcagggccctcaagcactgctgccacctgcgcagacccacgggactaggtgcagtcacgttcccccagtttggggaactacaggatggtgggcttccaggaagaggcagcgttctaggtctgaaagaacaccggtgaggagctgaacaccctgtcaacactaagtcccctacttctgtgtttaagagccactgtccccaagtggtcacatcctccctgtatcccctgggcactattctcaaacacagagcacagaggctgcatcatggcccaggagcccgggatgactaagcacgggggccgtcagcaccagggcttgcagactttcaaagggtgggtgacagtcagctttgtgtgtctcctcggtgagaccacggtgcccagttgtcaaacgccagtctagaggttgctgggaaggtatgtttttaagatgtgattaacctttaaattggcagactctgagcaaagcagattactccaccccagggtgggtgagtctcagccaatcagctgaaggccttcagggaaaagcctgcccaggcgcggtggctcatgcctgtaatcctagcactttgggaggccgaggcaagaggatcacttgaggtcaggagttcgagaccagcctggccaacacggtgaaccccatctctactaaaaaaacaaaaattaactgggtgtggtggcatgcacctgtaatcccagctactcgggaggctgaggcaggagaatcccttgaacccaggaggtagaggttgcagtgagccaagatcgcaccactgcactccagccaattccttagaataaatctctctctacacatacactcaagtatcattaaggacagggatacactgagaaatccctctctgggcgatgtcgtcactgtgcaaacactggaaagcccattccacacccaggctcccatgctctgtacagcgcagtgctgagctgctgtctgtttatttaaatatagagaaccgaggcaggcggatcacctggggtcaagagttccagaccagcctggccaacatggcgaaaccctgcctctactaaaaacacaaaaaaatgagctgggcctggtggtgtgtgcctgtaatcccagctactcgggaggctgaggcaagagaatccttgaacccaggaggcggaggttgaagtgagccaagatcatgccactgcactccagcctgggcaacagagcaagaccccgtctcaaaaagtaaaaataaaaataaaaataaacatacagaaggcacagcaaaaacatggcctgatcatcttacgtcgccaccgctgcgtaggcggtctgtcactggctgagccatcgccctgaggtggctgtacacataggcgcaaacacacacacgcttcgtcttcatcgcttgtttctctggagaaccataacacactcgcatttctgaaacccccacgtgctagctttctgggaatatggatttcaagtgccctccagggcagaaagtagtcactggagggcacagctgtgtgtggctggtgtggctggcacggctcccatctgcccagaagctgggccctttctcaggacctagagtccctggtggggatgagggacagagcctggagctaatcagaatgcagagacccggctgccttcccaacctgcctcctgtttccagggggaccttccccaccactccccgacctccccgaccccgcagtgctcaccttcctggccatgatgaggcccgagggtctgtgctggactttggtgaccaccccgccgttgcccgcgcccagctctgagatcctttcgaagtcatcgtctttgagttcgccgaccttggctttctgggtgagaaaggcttccagccgcttcttctgctgctcgtcaagttccagctcctccagcttcttctgcaggtccaccaggtttgccctgcagagaccccccagggtaggggttagctacctagggagactccatctggccgtttgctatgtggccgtggtgcatcggcccccaggaggacacagactggattcctgcacttgaggggttcatggtgtagaaggaaaggatccatgctgtgtacccccatagacacaccaatgaccagaatccagggcggctccccgggaactgaggacgctgccttgatcctgtctcaacaagtctagcagacctcaggacctcaaggataagctgcagctcaaaggacccaggaagcctccgtctttttcttttctttttcttttttttttgagacggagtctccctctgttgctcaggctggaatgcagtggcgcgatctcggctccctgcaaccttggcctcccgggttcaagagattctcctgcctcagcctcccaagtagctgagattacaggctcccgccaccatgcccggctaatttttgtattttcagtagagacagggtttcgccatgttggtcaggctggtctccaactcctgacattgagtgatccgcctgcctcagcctctcaaagtgctgggattataggcgtgagccattgcacgcggccgggagacctccttcctaacgcacgagctccggaccatgtcgggaggagacgaggaagctgggatcgggtgaacggagcccgggccaagatgtctgtctttgcaggagatagaggaacaagcgttctgagcagcctcagagcacagaatgagaaccaagagtagagggcagaaggctcagcacaaaagctgcatcaggtaggcacggtggtgcacgtttgcagtcccagctacttgggaggctgagacacgagaactgcttgaacccgggagggggagattgcagtgaactgagatcttgccactgcactccagcctgggcagcagagggaggctctgtctcaaaacaaaacaaaccaaaaaacaaaaaaaacaaaaaataagcatgaccagcctgggcaacaaagtgagacctatagccgagcacagtggctcatgcctgtagttctagttactcaggaggctgagcccaggaggtcgagactgcagtgagccatgatcgtgacaatgtactccagcctgggtgacagagcaagaccttgtttctacacaataaaaaatttctaacaatttaaacaagcaagtacattgcactttattgggtgattcaaggaatcttcagaggaaatttcgacagtaagctattttcacaaatgccttgactcagaaccagatcctggagtaacagacaactaagcgcaatgcacacaggaacccattgctgtgcacaagcaatggaatgtaaaccatgcgcacaaattaaaatcttctagtacccatgtttaaaaagaacaggtgaactcacttcatttatttagagacagggtcctgctctacctcccaagctggggtgcagcggcacgattacagctcactgcagcctccaactcctgtcctcaagtgatcctcccacctcagccttcctagtagctaggatcacaggtgtgagccatcatgtctggctctttttaattaattaatttttattattattattattttctgagacaaagtctcattctgtcgcccaggctggagtacagtggtgtgatcttggctcactgcaacctccacctcacgggttcaagcaattctcctgcctcagcctccgaagtagctggaattacaagcacccgccaccacgcccagctaatttttgtatttttagtagagacaaggtttcgccatgttggtcaggctgctcttgaattcctgggttcaagccacctgcccaccttggcctcccaaagtgctgggattacagacataagccactgcacctggctgaaattaattttaataacacatttgatttaacccatcaaaaatgttatcattttcaacgtacaaccagtatgaaaaatgaatgaatgtttcacactgtttccgtcttaagcctttgaaatctacaatggcattattgcgcctatgctctcgtgggtttgggcaattcttgttttatgtgttgcctgtagccaggggctactcaaccaggcagtgcagctttaaatggctctctggaagaacaggccacctccagaggtcccaattcaggaaggagctaaagccaaggtggacagccagagaggggactgaagcagggaatgaaggcgtggactgctccttccatctggaaatttccaatcccaaagttcgaccactgttcgcctacagctggaagtggcgtaagccacggggcacacaggccagaaccgaggcgatggcgctggagctggtgctgcaaagagctcgctggaaggcaggggcctgggcaccgcttcctgggctggacaaacaccatctcattccattctcaccatcgtccccggaggcccaggcaggagggaacagactcacaggggtgggggaacctgcccgaggtaacaacacctgcctgaggtcaggacaacccctgctcatcttagtgtcccccatgaggggaaacagggccctagtaggtgctcactgaggagctgctgaacaaggacccagaagaagcagaaatggcgagaccctgggagtgggacagaaggtaaggaggggaacatgaatgaatgaatgaataacatcaatgaataaatgaatatttattttttttgagacagtcttgctctgtcgcccaggctggagtgcactggcacgatctcagctcactgcaacctctgcctcctgggtccaagcgattctcctgcctcagcctcctgagtagctgggattacaggtgtgcatcaccgcgctcagctaatttttttggcatttttaatagagacggggttttgccatgttggccaggttggtcttgaactctgggcctcaagtaatccacccaccttggcctcccaaagggctgggattacaggcgtgagccaccacacccagccatgaatgaacacttctgatggcagacttggaaggtctcaagtactgctcaaaacattgaaaatgcattctggagtcagctgactaatccatcttaaatttactggcaacccaactgtggttattaaacaaaacaaaacaaaaccttggcgtccctacagccagcttcctctcctgggggaatccttcaagagatgggaatcaaaccccacacggaagagaaatgtgaagggcgagttctgtgcagagaatgaggaacgggtccccgtgtctggctgtgcccgtgttgacttgcacacattggcatcaagagtcttcatctgggtcacagaaggccgacccccaagcgggagaggccaccagacatgccacagtccctgacacctggttcttgaggggtcacaccgcaggcacggcacccggaccccagccaagggccccggggatcgccctgccctgcctcggcctgcagaacgggagtgcagagatcaccctggcatgaccccaccagtgtgtgcccccaacacccagtcccctccctcgtcctggagcagtgcgattctgccagcacgccacccggaccccagcatacccctttctcagatcccttcacccaggcctctggtcgccctccacctcctcaaagcttctgcactgggtcagcccctcacaagggttttccggtccactcacttcagaatctgcacctctgctttcaggggccagcagggtcccctgatccccacgcctcctcgttcctcacactctggcttccctgtctcctcacacttccagcttcagggactccacacactgggcaccgccacaagcaggagatgccctctcagagatgcccatcttgacatcttgacctccctgggaccccatcctgaccccctcagaaccccaacatgagacccctaggaccccctgctctgccctcccagaacccccacaacatgaccccccgaggaccccctaacctgacccccccagaatcccccaacatgacccccgaggacccaacctgaccccccccacaacatgaaccccctggaacccctgtcctgatcccactagacctcccccagcagaaacccctccatctggaacccgctagaactcccatcctgaccccgctaaagcccccccatgtcctgacacccctaagacacccccttgtcctcagataccccagaactcccaccctgacccccccaaagtcccccgatcctgacctttctagggtctcccaccccatcgtgaccccctaggacacccctctcccacatcctgacccttctgggagccccctgtcctcccctctcttcccttttccctggttgtctatggacctcctcaccccatcctctcccctaagggacccccctgccccaccttggcaccctaggtgccctcttcatcccatgccaacctcattactcagggactcattccccaaaaggaccgctccccgcccccccaagacctctcagcctgtcctccccacccaggtgctgcactctcaacctgtggctcaggcaccctcccaccccatctctcccccataggaaccctcccaccccatctctcccccatagggaccctcccaccccatctctcccccatagggaccctcccaccccatctctcccccatagggaccctcccaccccatctctcccccacagggaccccctcaccccatctctcccccatagggaccccctcaccccatctctcccccatagggaccctcccaccccatctctcccccatagggaccccctcaccccatctctcccccataggaaccctcccaccccatctttcccccatagggaccccctcaccccatctctcccccaagggactcgcttcactatcatttcaatatgcagaacaccccttgcctatccttcccccacaggcccccaccgacacatcctctcctcccagggaccccctcaaccccatctcacaattcaggggccctgcaccccatcttctctctgcaaggacatctccttggcctgatctcacgacttagggattccaaaccccatcttttccccaaagggatctcccctcactccaatctcattactcagggaccccaccatctccccgatttcactattcagggaccgttcaccccatttcactactcagagacctaccaccattctgctactcagtgactccatgccctgtcttttcccacagggacctcccttggccctatctcattattgagggacccttaccccgtcttttcctaccagggaccctaccccatctcagtctcattactcagggacccctcaccccatcctctcccctctggagcccccttgcccagatttcctcctcaggggctgcctgacctccccacaccccatcctctcctctcaggaatgccctgcaccccgatttccctactcagggtctcccctcaccctcatctcatgactacggcaacctttactccgtcctttcctcttaggaactcttcaccctcatttcactactcaaggaccccacactgtgttctctcctcttagagatacccctcaccccgatctcactgcttggggagcctcatcctgttctctccttggggacacccctcattccgattttcctactgagggactcccctcaccccagcttcacttttcagaagccccacaccccatcttctgcactgcagggacctcccctcactcaacctcgctgctcagggacccctgtccccatcctctcctcttagagacatccttcaccccaacttcactactcagagactcccgttatcccaattccactcttcaggaaccccacaccccatcttttccaccacaaggacctcccctcgcccaatctcactgctcaaagacccccctgccccgtgcacccttcgccccgtcctccgagggccccctgccccgtcctcccccgagggccccctgccccgtcctcccccgagggtcccctgccctgtcctcccctcgagaaccccctgccccgtgcaccactcaccccgtcctcccccgtgacccccctgcctcgtgcactcctcgcgaacccccgtcccctcgccccgtccttccccgagggctccctgccccgtgcaccccaagcctccggctgacccctgcccactcactcggaggcgccctcgctggtaggggatgggccctcggcgatggtagggttgatggtgagcgccggcagcaccggcttcctccgggccagcatcggggctccgcgggccggcggcggcggcgcctctagccggggcccatagggggcgggccgggagcggtcggcgcctacgcgagcccggggctgcggccgcggcccaggccggcgtcggggcggccgagggcgggcggcgctgcgggcctgggccgagggtagccgaggggcgctggggctgaggcgagcgagccgctaccgctgccgaggcccgaagaaggctgacgccgcagcccgagtccgagaggcagggggaggggaggggcggccacaagatcgcggaccggcttctcgcgataacgggatcgggagccgcgatggaccccacccccagccgccgcgcctgcgcagcagcacaaggccgcctttcggaggggaaaggggcggagaccgacgcgaggcggtgccgggaccgggcgccctcgcttgccttaccacggcgcgtgtgcccaagcgcttggggcatgaggcgcgggagcaggggaggagacggagggatgaaggctggggtgatggtcgtgcacaggtgggcagggtagccagactcctgagagcctgtggtgccccaggctggggctgagagaacccgtaagaccccagaacagtggacgagacccacccagagtccatttaatctttttggcaagcgtggacacacgcccctagcccccaccgccttagagtgtcagttactccccctccttcatcagaacaaggccactctaaaacatttttaaaatttattttaattgacaaataaaattgcatatattactatgcgcatgttgaaacatttttattataaaatacacataacataaaacttgtcattttaaccatttctaaatgcacagctcagcggcattaagcaaccaccaccaccaccatctccagaattttctcatcttccgaaactgaaacactgtcccctatgaaacctcactccctatccccctccccagcccctggaacccaacgtcgtacttcctgtgaatctgatgattctagggacttcatatgagtaggatcacacaggttttgtccctttgtggctggcatatttcactgagggccacgtcctcaaggtgcctgttgtagctgtgttagatccacgttgtaacctgtgttagaatttacccacttgactactccgggcatacttccaatcgggtagccctgctccaaaaaagagcagaaaaaaaaaaaaaaagaaaaatttccctttttttttttttgagacggagtctcgctctgtcacccaggctggagtgcagtggtgcgatctcggcccactgcaaactctgcctcccgggttcacgccattctcctgcctcagcctcccgagtagctgggactacaggtgcccaccaccatgcccggctaatttttttgtatttttagtagagacggggtttcaccgtgttagccaggatggtctccatctcctgacctcgtgatccacccgcctcgatctcccaaagtgctgggattacaggcgtgagccaccgcacccagtcaggattttcctcctttttaaggctgaataatattctattgtgtgcatggactatattttgcttatccatttatctgccactagacacttcggtgaatcgtgccgctatgaacacagatgtacaaatatctgtttgagtccttgccttgagttcttttgggtatatgttctgaagaggaattactggattatatggtaattctatgttgaactttttgaagcaccaccttactatttaatacaatagccgtaccactttataagaaaggtcataggctgggcgcggtggctcacgcctgtaatcccagcactttgggaggtcgaggcgggtggatcacctgaggtcaggagttgaagacgagtctggccaacatggtgaaaccccgtctctactaaaacaaaaaaatacaaaaattagccgggcatggtggcgcgtgcctgtaatcccagctactcgcgaggttgaggcagaagaattgcttgaacccgggaggcagaggttgcagtgagccaagatcacgccattgcactccagcttgggagacaagagcgagacttcgtctcaaaaaaatcaaacaaacaaacaaacaaacaaataaataaataaaatacaaaaattagccaggcctggcggtgtgtgcctatagtctcagctactcaggcggctgaggcaggagaatcgcttgaacccggggggcagacgttgcagtgagccaagattgcaccactgccctccagcctgggcgacaaagtaagactccgtctccaataaaacagaacaaaaaaaaatttaattttttgccaggtgccgtggctcacacctgtaatcccaggaccctgggaagctgaggtgggctgatcacttgaggtcaggagttcgagaccaacctggccaacatggtgaaacctcgtctctactaaaaatacaaaaattacacaggtgtggtggcgggtggctgtaattccagctactagggaggctgaggtgggataactgaaccccggaggcggaggttgcagtgagccgagattgtgccatcgcattccagcctgggcgacagagccagactcacgctcaaaaaacaaaaccaaccaactggccgggcgcggtggctcacgcctgtaatcccagcactttgggaagccaaggcaggtggatcatgaggtcaagagattgagactatcctggccaacatggtgaaaccccgtctctactaaaaatacaaaaattaactgggtgtggtgatgcgtgcctgtagtcccagctactcgggaggctgaggcaggagaatcgcttaaacccgggaggtggaggttgcagtgagccgagatcacgccattgcactccagcctgggcgaccgaccgagactccatctcgaaaaaaacaaaacaaaacaaaacaacaaacaaaacactgctcctggggaagcctgctcctgggtttttacaatctgggcctttcagttttacttctcatcgctcccacccgcttgtccaaaattcagatggatgcatatgtggcctcaaataaggacaggccctttcagagacagggctatttccatgttccttctgttttgcctagcaatctttctcccattttatcctattttaggctttttttttctttttaagacaagttctgactctgtcacccaggcctcaggctggagtgcagtggcacgatcataactctctgcagcctccacctccctggctcaagcgattctcccacctcagcctccctagtagccctggctacaaacatacgccaccacactcggctaatttttgtattttttgtccagacagggtttctccatgtcactcaggctggtctcacactcctaggctcaagcgatcctcctgcctcgtcctcagcagtgctgggactagagccgtgagccactgcactcacctattaatgcacaagtttctgaagttcaatttcttggattattacaactctatacatccatgtaacacttccccttactccagaaagtctgttcactgcctttttagttcattctcttcctctgcacccagcagtagtgagctggtaaatgtttaacaatgagccattaaaataaggagaggccgggtgtggtggctcacacctgcaatcccagcactttgggaggccaaagcaggtgatcacttgaggtcaggagttcgagtccagcctggccaacatggtgaaaccccatctctactaaatatacaaaaattaggctggtcacgggtgtaatcacagcactttggcaagccgaggtgggcagatcacctgaggtcaagagttcaagaccagcctgaccaacatggtgaaaccccgtctctactaaaaacacacaaaaattagccgggcatggtggtgggcacctgtaatcccagctactcgggaggctgaggcaggagaactgcttgaaccccggaggtggaggttgcagtgagccaagattgtgcccctgcactccagcctgggcaacagagtaaggctccatctcggaaaaaaaaaaaaaattagctgggcatggtggcaggtgcctgtagtctcagctacttgggaggctgaggcacgagaattacttgaacctgagaggtggaggttgcagtgagccaagatcgtgccaccgcactccagcctgagggagactctgtctcaaaaaaaaaaaaaaaaagaagaagaccagatgtggtggctcatgcctataatccctgcactttgggaggccgaggcgggtggatcacctgaggtcgggagttcgataccagcctgaccaacatggacaaaccctgtctctactaaaaatacaaggccgggcgcggtggctcacgcctgtaatcccagcactttgggaggctgaggcaggcagatcacgaggtcaggagatcgagaccagagaccatcctggctaacacagtgaaaccctgtctctactaaaaatacaaaaaaattagccaggcgtggtggcgggcacctgtagttccagctactcaggaggctgaggcaggagaatggtgtgaacccgggaggtggagcttgcagtgagctgagatttcgccactgcactccagcctgggcaagagagcaagactctgtctaaaaaaataaataaataaaaataaaaatacaaaactagccaggtgtggtggcacatgcctgtaatcccagctacgagggaggctgaggcaggagaatcgcttgaacccaggaggtggaggttgtggtgagccgagatggtgccactgtactccagcctgggcaacgagagtgaaagtcagtctcaaaaaaaataaagttgacaatggtatcaaagatgcttacgagtggctgtaagccagctgcagtccactactactcccaaaacccccccagattctgcgttctatccccatagattagtttttgcctgttcaagagtttcatgtaaatggaattgcactcatggtgtcagttctttttttttttttttttttttgagacagagtctcactctgtcacccaggctggagtgcagtggcacgatctcggctcactgcaacttccacctccgaggttcaagcgattcccgtgcctcagcctccggagtagctgggattataggcgtgtgctaccacacccagctaatttttgtatttttagtagagatggggtttcaccatattggccaggctggtcttgaactcctgatctcgtgatccacctgcctcggcctcccagagtgctggaattataggctgggattacaggcgtgagccaccgcacccggcctggtgtcagctctttctgctttaggacaatgttttgtttttggttttggttttgttttagacaggattttcctttattgcacaggctggagtgtagtggtgtgatctcagctcactacagcctccactttctgggctcaagccatcctcccacctcagcctccggagtagctgggactacaggctcccaccgccatgcccaactaattttatattttttgtggagatgggggggtctcatcatgttgcccatgctggtctcaaactcctaggctcaaatgaccccagtgacttggcctcccaaagtgctgggattacaggcgtcagtcactgtaccaggtcctgagacaatatttttgagattcatttatattatttcacataacgataattagttcggtttccttgctagatgatatcccattgtatgtactgtgggcattgcccttgacatagaacagtaaatgaatcatccttctggccgggcgcggtggctcacgcctctaatcccagcactttgggaagccgaggcgggtggatcacgaggtcaggagatcaagaccatcctgactaacatggtgaaaccccgtctctactaaaaatacaaaaaaaattagcagggcgtgggggcaggcgcctgtagtcccagctacttgggaggctgaggcaggagaatgccgtgaacccaggaggcggagcttgcagtgagccgagatcgcgccactgcactccagcctgggtgattgagcaagacggtctgtctcaataagtaagtaagtaaataaataaatatataaattctccttcttttttttggagacgatctcactctgttacccaggctggagtgcagtggtgtaatcactgctcactgcagcctctacctcccgggatcaggtgatcctcctgcctcagcctcctgagtagccgggatgacaggtgcacaccaccatgcccagctaattttttattttttgtagaaatgggcaaggggagtctcaccatcttacccaggctggtctcaaacccatgggctcaagcgatcctcctgcctcagcctcccaaagtgctgggattacaagtgtgagccaccaagcccagcctgttatgaactttttttttttttttgacagggagtcttgctctgtcacctgggctggagtgcagtggcgcaatctcggctcactgcaacctccgcctcctgggttcaagcgattctcctgcctcagcctcctgagtagctgggattacaggtgcgcgtgccaccacccccggctaatttttgtattttttgtagagatggggtttcactgttttggtcaggctggtctcgaacccttgacctcgtgacctgcctgcctcagcctcccaaagtgctgggattacaggcgtgagccactgtgccgggtctgttatgaattttttgaggccaaagaagatgttggatgtatctccttctctcccactttacctccccggacataatggatgctggatacatatgtgttacttgaaggaatgtcctgggtgttcttgttctcaaggagacaggttgccttattacaaggcaaccattcgcagcacttatgataaaacaggagctttaattgctgaggttacagtgcagcctcaccccctccacccattctctatctttactaccaagcatagtttgccctgtgacctctctctgtgatatattttctacttatcattgcttccaataacactttttctgagtacatctgtctcttggtcccagagacgtgggtgtctcctaaattgctcctcccaggaaataaatttctaatagctttcttgatagattcaatccaaggtgacatttatcttgtagaggcatatgctggtgttaatatcacatgtgtacattgtttccaactagcaatgtcctgtgaactttatctctgtcacctgtgcaatggattaactgacagaacagcgaactgaaccctttggaaagcaatttaaccctatcgtgagcgcgctgtgactcagcagttgggatcgtgggcatgtgacttagagagactcttgcctgtgtgcaaacgggagactcacacaataatgttctcaatggcaaaaatttggaaagtacacagagtccattgatgggagaatggaaaaatacgtcctagtgcagtcccacagagaaatatgatacagcagaaaattcctaagtgacaacagcataaaagaatcttagttagtctcagctacttggaaggctgaggcttgaggattatttgagcccaggggttccaggaagacctgggcaacatagggagaccccccttctctaaagaaaagaaaaaggcgggctgggcgcggtggctcacgcctgtaatcccaagactttgggaggctgagatgggcggatcaccaggtcaggagattgagaccattctggctaacacagtgaaaccccgtctctactgaaaaaataaaataaaataaaataaaataataaaaaaattagtcgtgggtggtggtgggcgcctgtagtcccagctactcaggaggctgaggcaggagaatggcatgaacccaggaggcggagcttgcagtgagccaagatcacgccactgcactccagcctgggtgacagagcgagactccgtctcaagaaaaaaaaaaaaaaaagaaagaaagaaaaaggctggatgtggtagctcacgcctctaattctagcactttgggagggcgaggcaggcagatcgcctgaggtcaagagttcgtgacaagcctgggcaacatggtaaaaccctgtctctactaaaaatacaaaaattagccaggtgtggtgatgcacatttgcagtcccagctactcagaaggctgaggcaggagaattgcttaaactggggaggcggaggttgcagtgagccaagatagcaccactccagcctgggagacacagtgagactcaatttaaaaaaaaaagaaaaagaaaggttataaaagactataatgccatttttattttttaattaattttttttaaagagacagagtcttgctgtgttggccagtataagcttgacctccaagcctcaagccatcctcccaccgggaccttccagaatgctgggattacaggcatgagccaccccacctggccttatgacaaccttttttttttaaattaatttatttatttttgagatggagtcttgctcttttgcccaggctggagtgcagtggtgcaatctcggctcactgcaacctccgcctcctgggttcaagcgattctcatgcctcagcctcctgagtagctgggattacaggcatgtgccaccacgcccagctaatgtttttgtatttttagtagagatggggtttcaccatgttggccagactggtcttgaactcctggcctcaagtgatctgcccgcctcggcctccaaaagggctgggattacaagtgtaatcaagtgagccaccacgcctggccttatgacaccatttttataaaatgaaaatggctcagtgttattagccattagagaaatgcaaattaaaaccatgatgagatacttccatacgcctattagaatggctaaaataaaaatactgaccaggcatagtagctcttgcctataatcccaacactatggtaggctgaggcgggaagatggcttgaggtcaggagttccagaccagcctgggcaacatagtgagatccttgtttctatgaaaacaaacaaaaaaaaacttagctaggtgcacacctgtagtcccagctacttgggaggctgaggtgagaggatcgcttaggcccaggaattcaaggctgcaatgagctatgatagtgccactgcactccagcctgggtgacagagcaagaccctgtctcaaaaggcaaaagaggctgtgtgaggtggctcacgcctgtaatcccagcactttgggaggctgaggtgggtggatcacctgaggtcaggagttcgagaccagcctggccaacatggtgaaaccccatctctaccaaaaatacaaaattagccaggtgtggtgccaaacgcccgcaatcagagctactcgggaggctgagacaggaaaatctcttgaacccagtaggcagaggttgcagtgagccgagattgtgccactgcaccccagcctggacgacaagaacaaaactccgtctcaaaaacaaaaacaaaatttggccgggcacagtggcttgcacctgtaatcccaacattttgggagcacaagtaggcagatcgcttgagctcgggagttggagaccagcctgggcaacatggcaaaaccccgtctcagccgggcgcggtggctcacgcctgtaatcccaacagtttgggaggccaaggagggtggatcacaaggtcaggaaatcgagcccatcctggctaacacggtgaaaccccgtctctactaaaaatacaaaaaattagccgggcgtggtggcgggcgcctgtagtcccagctacttgggaggctgaggcaggagaatggcatgaccccaggaggtggaggttgcagtgagccgagatcgcgccactacactccagcctgggtgacagagtgagactccatctcaaaaaacaacaacaacaacaaaaacccgtctctagaaaaaaaaaattatttgtgtgtggtggtgcatgcctgttgtctcagctactcaggaggctgaggcaggaggatcacttaagcctgtgaggtcaaggctgcagagagctataatgacaccactgtactccagcctgagcaggagagcaaaaccctatctcaaagagaaaaaacaaaaacaaaaaaaaaccagcaacgaaaagattaagatggtaaattttttgatatacatgtatttaccacaattttaaaaagattagggctgggcgcggtggctcacgcctgtaattctaccactttgggaggccgaggtgggggaatcacgaggtcgggagttcaagaccagcctggccaatacggtgaatccccatctctactaaaaatacaaaaactagctaggcatggtggctcatgcctgtagttccagacactcgagaggcagaggcaggagaatcgcttgaactcaggaggcggaggttgcagtcagccaagattgcgccactgcgctccagcctgggcaatagagattccgtctcaaaaaaaaaaaaagaaaaaagaaaagaaagattatacataaattatagaaaaggaaaagtgcaccttataacgtttagggatatgaacacatgattaattgaatttcgtgaagtctgtgagttcctggaatgccgggaactcatccatcttggcatccctggctgccagcaccaagcctgacacacgggaggtgtttggtgagcacagatgtgagcaatgaatgtggctgccttggggacctcgtggcatggtggcagtgtgcaacctgcaggggtttggggcaaacatacctggctcaaagcctggtgccttggatcactggatgttctcatcctattccagtgagttcccgatgaaacctctcttgctctcagcctgtggtggagctcccagggtagttctaatctgaaactttggaagaaaccaatctgagctttcttccagagctgcagctgattaacttaacaacctggggtgcagtgttcaaggaggaaaacaggatgctctgagagaagcttagcagtgctgtgccaaagccagctccttctggtgggcaagagccgatttgttcaagttttgggaaatttgggaactgctggttaatagctacgatttcaaattaggccaggcgcagtggctcacgcctgtaatcccggcgctttgggaggttgaggcaggcagatcacaaggtcaggagtttgagaccagcctgggcaacatggtgaaatcccgtctctactaaaaatacaaaatttagctaggcgtggtggcaggtgcctgtaatcccagctactgggaaggctgaggcagaggagttccttgaacccgagaggtggaggttgcagtgagccgagattgcaccactgtactccagcctgggacagaccgggactctgtctcaaacaaacaaacaagcaaaaattaggccaggagcagtggctcgcccctgtaatcccagcactttgggaggccgaggcgggaggatcatttgaggttaggagtttgagaccagcctggtcaacatggtgaaacctcgtctctactaaaaatagaaaaattagctgggagtggtgttgggcacctgtaatcccagctactcgggaggctgagacgggaggatggtttgaacccgggaggcggaggttacagtgagcggagttagcgccattgcactccagcctgggcaacaagagtgaaactcttaaaaaaaaaaaaaaaggaataaggaaatattttccagtattcagaaatgattatgtgattcatcacagaagtcatccacatttttgatgaccaagtgaagttctttttttttttttttttaatttgagatggagtctcactctgtctctcaggctggagcgcagtggtgccatctcggctcactgcaacttctgcctcccaggttcgagtgattctccctgcctcagcctcccaagtagctgggattacaggcacctgccatcacaaccggttaatttttgtattttttttttagtagagacggggtttcaccatgttggccaggcttgtctcgaactcctgacctcaggtgatctgcccgccttggcctcccaaagtgctgggatgacaggcatgagccaccacacccagctggtttctagagtttctttctttttttttttttttttgagatggagtctcactctgtcgccaggctggagtgcagtggcgcaatctcggctcactgcaacctccgcctcctgggttcaagtgattctcctgcctcagcctcccgagtagctgggactacaggcacatgccaccacgcctggctaattttttgtatttttagtagagacagggtttcaccatgttggccaggatggtcttgatctcttgaccttgtgatgcacctgcctcggcctcctaaagtgctgggattacaggagtgagccactgtgcccagcctagagttgttttatgactttgtgccacgtcctggccgatggatgctcatgatgacatttattttatcgctctgcaatcaaagatttgtgcagatgaatgggaactgcgagagaacatgggaaaatgaaaggggtttaattgcgggagggaaggaaaacacataaaatgtattttttcgctttcccatgatttatttatttatttttattattattatattttgagatagagtctcgctctgttgcccaggctggagtgcagtggcatgatctcggctcattgcaacctctgcctcctgggttcaagcgattctcctgcctcagcctcccgagcagctgagattacaggcatgtgccaccaaacccggctaatctttgtatttttagtagagatggggtttcgccatgttggccaggctggtctcaaactcctgacctcaggtgatccgcccacctccacctcccaaattgctaggattacaggcgtgagccaccgcgcccggccttaccaagttctgattgaagtgaaatgcctggaagaaagataaagttaaaatgaggttttcacaacatgtcgaaatcactctgagcaaagttccaaacccaaggttctagaaagtgcaatgacttttttttttttaaacaggggcaattaaaaatttcccaggcttagcaagatcaaatgggtgtgtgcagcgctctctctgacatgcaatttatggaattattgatttgtcaatgtgatctctgcacttcctgtgaggaatttgaggtcctgtttggagaatttggtaaatagggaatctcgcagaaacatggggtcttgagaaactcatttcaaccctctgagcctcagtttccacttttctttttttcttttcttttctttttttttttttttttgagacggagtctcactctgtcacccaggctggagtgcagtggtgcaatctcggctcactgcaagctccgcctcccgggttcacgccattcttctgcctcagcctcccgagtagctgggactacaggcatccgccaccacgcccggctaattttttgtgtttttagtagagacggggtttcaccatgttaaccaggatggtctcgatctcctgacctcgtgatctgcccacctcggcctcccaagtgctgggattacaggcatgagccaccgcgcccggccttcacttttctttttttagaaagacagggtgtctgtcactcaaattggagtgcagtggcatgatcatagctcaccacggcctctaattcctgggcttaagtgatcctctcaccttagcctcccaagtagctgagaccacaggcatgtgccaccatgccctgctaatttttaaactttttgtagagacaggtttcactttgtttcccaggctgatctcaaactcctgggctcaagctatcttgtcaccttggcctcctaaagtgctgaggttataggcgtgacctattatgctggcaataaaataatttaaaacaaattttttagagacaggatctcacctggcacccaggctggagtgcggtggtgcagtcatagctcaccgcagcttccaactccttggctctggtgatcctcccacctcaagcccctgagtagcctggactacgggcacttcccaccatgcctggctaatttttaaattttttgtagagacagggactccctgtgttgcctaggctgatcttgaactcctgtgctcaagcaatcctctcacctcagcccctcaaagtgctgggattacaggcgggagccaccatgccccggccataaaatcagtttttaactcaggctgtacaacaataggcagtgagctgtgggctctaatttgcccaccgcaatacaggctgtgattatattgggaggcatttgggacatgaaacatggtcatgtttgtttgttttgttttgttttgcttttggccttgttctttttttgttttgttttgttttgttttgttttgttttttcagagagtctcgctctgtcacccagactggagtgcagtggcgagatcacggctcactgcaagctccgcctcctgggttcacgccattctcctgcctcagcctcccaggtagctgggactacaggcacctgccaccacgcctggctaatttttttttgtatttttagtagagacggggtttcaccgtgttagccaggatggtttcaatctcctgaccttgtgatccgccccccctcggcctcccaaagtgctggaattacagtcgtgagccaccgcacccggccagccatgttctttattatcaaactactgtgagtcacttttcttaaggttcattgatttgacacatttttattgaaaccctactaagtgccaggcattggatgagacaaaacccctgccctcacagagtttacagtctgggggagaaataggccacagataagatgccaggaagagccacagagatgaaaaaagtggggaaggagcttaggtgcagtggttcatgcctgtaatcccagcactttgggaggctgaggtgggaggatcacttgagtccaggagttccaggctagccaaggcaacatagtgaaaccttgtctaaaaattaaaaataaaggccgggcatgatggctcacgcctgtaatcccagcactttgggaggccaagacaggcggatcacctgagtcagaagttcgagatcagcctgcccaacatggtgaaacccagtctctactaaaagttacaaaaattagccgggcgtggtggcaggtgcgtgtaatctcagctactcgggaggctgaggcaggaaaattgcttgaacccaggaggcggaggttgcagtgagccaagatcgcaccactggactcctgcctgggcgacaagagcgaaactctgtctcaagaaaaaagaaaaaagaaaagggaaggaaggggatagaactgtggaagcagagagttgaggaaaggttggagttttagtttttgttttgttttttttgagacaatcttactctgtcacttaggctggagtgtagtggctcgatctcggctcactgcaacctccacctcctgggctcaagtgattctcctgcctcagcctcccgagtagctgggactacaggtgtgcaccaccacgcccagctaatttttgtatttttagtagagacagggtttcatcatgttgccaaggctggtctcgaactcatgagctcaagcagtctgcccacctcagcctcctaaagtgctgggatgggaggcgtgagccactgtgcctggccaaggttgcagttttaagaagtctgttggggtgagtctcattgaaaaggtgacatttgggcagaggcgggagtgtaccccacagatatcagggaaaggttttgaagcagagggcacagcccatgcaaaggccctgaggcaggagcacgcttggtgttggaggagcagtaaggaggcctgtgtagctatagcagagtgagcaagggggagagaaggaggaggggaagatggggagggggtaggggtagaggacagggcagatcatgcagcacattgtggaccatagggaggacttgggcattgacctccaaggaggtgggagccatagaagatttccggcagaggagggacaggctctgactccggtgctcacgggcgccctctggtgtctgctgcagggaagacaagtttgcaggacgagaatgggagctgagaaaccagggtggaggagagtgggctggtccaggccggctaaggagaggctgcgccaggtagaaggatgcattttgaacatggagcagacaagactttcctggtgtagagttttgcaggtatgagagaaaaactcagggataagaaatttggacctgacccctctggaaggatggtgcttctgtttgtaaaatgggaacgacagaccaggcgcgatggctcacacctgtaatcccagcacttcgggaggccgaggtgggcagatcaccagaggtcaagagttcgagaccagcctagccaacatggtgaaaccccttctctactaaaaatagaaaaaaaataggtgggcgtggtggcggacgcctgtcatcccagctactcgggaggcagaggtgggagaattgctcgaacctgggaggcggagttgagatggcaccactgaactccagcctgggcaacagatcgagactccatctcaaaagaaaaaaaaaaaaaagaaactttccccatggcagaagaaagactgggaggttaggtagttccggctgcagtagagaatgtgagtttctcataagatcctctagagggagccgggagctaggacgcaggtccagcctcttatccggagtcctcctcgtatcccccatcccccagcaggatgggcctgggtgggaaaagtggtggggtcagcaggggtggtctttgtctttgcaacagggaaggccctgtctacccttccagagttgggggcttggaggagaggggatgccaaattcgcacaggggttagcaaactttttcctaaagagccgtataataaatacacacacactaaataaatatatacacagtttaggcggggtgcagtggctcacgcctgtaatcccagcactttgggaggccgaggcggggggatcacttgagatcaggagttcgagactagcctggacaacatggcgaaacccagtctctactaaaaatacaaaaattagccaggcatggtggcgcgtgcacctgtagtttcagctacttaggaggctgaggcaggagaatcgcttgaacccaggaggtggaggttgcagcgagctgagatcgtgccactgcactccagcctgtgcgacagagactctgtctcaaaacaaaacaaaacaaaacgaaaaaacacacacacgcacacacacaaaaaaccacccagcttaaactctgtctgttgcagctcctgaaatctgctctcgcagtttgcaagaggccttagataacctgtacgcaactgggcatggctgtgtcctaatacagttttatttttagaggctgaaatgagaatgtcacataattttctgtgaatgctaccgctaccatgaaataattcttttttttttctttttttttttttggagacggagtctccctctgttgcccaggctgtagtgcaatggtgcaatctcggctcactgcaacctccacctcccgagttcaagcggttctcctgcctcagcaagactccatctcaaaattaaaaaataaataaacatataaataaaagttgcctaatctagaacctcctacaggcaacagtagctgcctggaatttaacaatgttgtttatttatttatttatttattttttgcttctgtttcaggcaccagatactacatttctttttaatttactctagcattataatgtttccttttacaaaagttgttgagaaggagtcttgctctgttgcccaggcaggagtgcagtggcgggatctcggctctctgcgagctccacctcctgggttcacaccattctcatacctcagtctcccgagtagctgggactacaggcgcccgccaccatgcccggctaattttttgtattttttttttttttagtaaagacagggtttcactgtgttagccaggatggtcttgatctcctgacttcgtgatccacccacctccgcctcccaaagtgctggcattacaggcatgagccaccacgcccggccaaccttcattttttttcaataaatttattttaaaaagaaaactttgtaacaggataataaattgaaaccaataatggatacccaaaatagaagggaactgtaaaaatacatgcaatggccgggctggcgcagtggctcacgtctgtaatcccagcactttgggaggctgaggcaggtggatcaacacaggtcaggagttcaagagcagcctggccaacatggtgaaaccccatctctactaaaaataagaaaaattagctgggcacggtggcgggtgcctgttgtcccagctactcgggaggctgaggcaggagaatcgcttgaacctgggaggtggaggttgtagtgagccgagatcacgccactgcactccagcctgggctacaggtgagattctgtctcaaaacaaaacaaaacaaaacaaaacaataacaataacaaataaataaatgcaatgtttactgttcttaagattattattatttctttccttcttttatttttttgagacagtctggctctgtcgcccaggctggagtgcagtggtgtggtctcagctcactgcaacctgcacctcccaggttggagcaattctcctgtctcagtctcctgagtagatgggattacaggcgtgcaccaccgcgcctggataatttttgtatttttagtagagacggggttttgcaatttaggccaggctggtcttgaactcctaacctcaggaatatcctcctgccttggcctcccaaagtgctgggattacaggtgtgagccaccacgcccagcctgccagggattaaacattaacgtcaatatttgagctggcaggggctttatattaccttcacatctatccccacatttcatagaccaagaaacagtctgggagagaagcaactctctggcatcacaagtttgctgctgagctagggataggactctctttctctctcttttgagacagggtcttgctctgtcacccaggctggactgcagtggtgccattatataccactgcagcctcaacctcctgggctcaagcaatcctcctgccttggccccctgagtagctgggaccacaggcatgcaccatcacacctggctaatttttgtattttttgtaaagatgggatcttgctgtgttgcccaggctggtcttgaattccttggctcaagtgatctgcccgcctcagccccccaaagtgctggcattataggcatgagccaccatgcctgcaccccaccccagattttttaattagctgagctaggtggcatatgcctgtggtcccagctactcaggaggctgaggtgggaggatcacttgagcctggagtttgaggctgcagggaggcctgggtgacagagggagaccctggctgaataaataaataaatagccttgcgcggtggctcacgtctgtaatcccagcactttgggaggccgaggtgggtgggtcacctgaggtcaggtgttcaagaccagcctggccaacgtggtgaaaccccgtctcttctaaaaatacaaaaattatccaggcatggtggcttatgcctgtagtcccagctactcaggaggctgaagcaggaaaatcgcttgaacccaggaggcagaggttgcagtgagccaaaatcgtgccactgcattccagcccaggcaacaaagtgagaccctgtctcaaaaaaaaaaaaaaaatagtagggttacatgttgggaaatttaggtacagaatcagatacgcgcaggaaggtagataatgtgaagtgagactcagggagaaggaagcatgtatcggccaagcagaaagacctcagaaggaatgaacccttggccacatgtggtggtgaacgcctgtaatcccagctacttgggaggctgaggcaggagaatcgcttgaacccgggaggtggaagttgcagtgagttgagatggcaccactgcactccagcctgggcaacaagagtgaaactccgtctcataaaaaaagagaaggaatgaatcctgcccacaccttgatcttgcagactagatagggaagcccagggatacttcagttcttggggcctggaaatgctgtcctcctcaacccccaggccaaccccggtagggtggagcggaggagacaccccctgcccctgccctgtttcctcctccaccaacgggaaggatgccagtgggggcctcctgtgcctccttttccaggtgagagggtccgctgtgacccttggacctaccagccataaagcaatcaccgggaggaggtggtggcgagactgggaggtgcggactggactgaggggtgtggatcaggagatgagacgggttaggtgctgactctcggtaccgtcctgcagacaacctgttcccctgaaactggtggacagactttctttttttctttctttctttttttttctttttctttttgagacagagtctcactctgttgcccaggctggagtgcaatggcgtgatctcagctcactgaaacccctgcctcctggttcaagcgattctcttgcctcagcctcccaagtagctgggattacaggtgtgcgccagcacgcccagctaattttttgtatttttagtagagatagggtttcactatgttggccagtctggtctcggactcctgacctcaggtgatctgcctgcctcggcctcccaaagtgctgggattacaggtgtgagccaccgcgtccagcctatttacttcttatacaggaatggtttcattcagcatcttcctctcgtgggtggggagtggggaatgtctcctcagtcttgctccctgttggatcccagcacccggcacacagcaggtgctcaataaataacagttacaggaatgaatgaatgaatgaattctcaagcacagtgtcctccattctttaagaagggcagagcgagtcccccaaactcacaggatttggaggccctggctccagtgttctgtcttcacccacccctctgagagcagaggctggaactcctgggatccacccaggacatcagaggagagttggatgcctggagggtcaggtcctaatcaatgtcatcgcccgtgaggccggccagagtccccctgtggcctcccagcctctggctggcccctggcacacccacatcacaagggttttactcactgcctggctgtattacaagggagggaaggggaggagggggaggaaaaggaggaggaggaggagggagggaaggggagacgggagaggagaggaaggggaggagggcaagagggaggaggaggaagggaggagggaggggggaaggggaggagtgggaggaggagggagaagagaggaggagggggaggagggaaaggaggagggagaggaatggggaaagaaggggaggaggggaggatgacgggggagtggaaggagaaggaaggaagcacggaggagtgggaggaagaggagaaggagaaggaagggaggagggagaggagaagggggagaagggagaggtggggaggaggggaagagggggagaagggggaggtggggaagaaggaggagggtgagagagaggaggagggaggaggctgaggaggagggagaggagggagagaaaaagaaggagggagaggagtggggaaggaggggaggatgagagagaggatggggaggggaaggagaagagggaagggagcagggaggaaggggaggaaagagaaggggaagaggagagggaggaggagggaaaaggccaaggaggagggagcagggaggaggaggaaggcaagaggaacagaatggagagggaggagggagaggaggagtgggagctgctgccctcctggacccactcactttttccaccgggaactggcccacaagggtggtgctcaaggaccccagggcaagtccccccgaccccgcatctgtagcaggggacctgggtgttgtcagttctcctgcctgactcatgcaatggccaagtgagtcacatccccttatcagctcctctgtcctcctgtgcagaatggggactgtccttacgatcagagctgtgcagaggccaaagggctaaggcaaccaggaagggacagccgggcatccgctgggcgtcacgggactgcagtcagatagatttcttttttcttttttttttttttgagacggagtcttgctctgtcgccagtctggagtgcagcggcaaaatctcagctcattgcaacctctacctcccgggctcaagcctcctgagtagctgggattacaggcatgcaccactgcgccctgctaattttgtatttttagtagagacggggtttcaccatgttggccaggctggtctcaaactcctgacctcaggtgatcctcccacctcggcctcccaaagtgctgggattacaggcgtgagccacctcacctggccagaagtccctttttagcgctttccgtgggaatgctcccacatgtggttcgtcctttatccctggctttacacatgaggaaactgaggcagggggaggcagtcgtttgcccacagtcacaggggggcaagtggcagagccaggattctgtccaatagaccatgtagacttttttttcctttttgagatggagtctcactctgtcacccaggctggagtgcagtggtgcaatctgggctcactgcaacctccacctcccgggttcaagcgattctcctgctttaccctcctgagttgctgggattacaggcgcctgccaccatgcctggctaatttttgtatttttagtagagacggggtttcaccatgttggccaggctggtctcgaactcctgacctcaggtgatctacctgcctcggcctcccaaagtgctgggattacaggcatgagctcctgtgcccagctaatttttgtatttttagtagagatgggttttcaccatgttggtcaggctggtctcagactcctcacctcaagtggatcgcctcagcctcccaaagtgctgggattacaagcgtgagccaccgtgcccggcccacgtagacttttatttattcacttatttattgtttatctccacgttcctgaggtatcctcttaagttttccagcagctatattttaaaagttcaaggcaaaattaaatttcacttaaaaaatatatttgtggccgggcgcagtggctcacgcctgtaatgccagcactttgggcggccgaggtgggaggatcacgaggtcaggagattcagaccatcctggctaacacggtgaaaccccgtctctactaaaaatgcaaaaaattagccgggcatggtagcacgtgcctataatcccagctattcgagaagctgaagcaggagaattgcttgaacccgggaggcagaggttgtagtgagccgagttcgtgccattgcactccagcctgggcgacagagcaagactccgtctcaaaaaaaaaaaaaaaaattaaataatgatgaactcttgctcgtttgatgacattgtattttttgcgcaatgggaaactcctgtggttcccgggacagcacgctgttgtatgttctgctgggtgggtttatgagaattgacaacagtgtgcaaacacattgggcaatgcagggctttatacagggacgtgttccattgtcaagcttttattgactttaccacttggctcaaaacatgggaagggccaggtgtggtggctcatgcctgtaatcccatcactttgggagaccgaggcaggcagatcacctcaggttgggagttcaagaccaacctgatcaacatggtgaaaccccgtctctactaaaaacacaaaattagctgggcgtggtggcgggcgcctgtaatcccagctactcaggaggctgaggcaggagaattgcttgaacctgggaggcagaggttgcagtcagccgagatcgcagccattgtactccagtctgggcaacaagagcgaaactcagtctcaaaaaaaaaaaaaaaagagggtttggcgtggtggctcatgcctgtaatcccagcactttgggaggctgaggtgggaggatcacttgaggccaggagtttgagaccaacctgggcaacatgaagaaacctcatctccacaaaaaaatacaaaaattagccaagcgtggtggcacgcacctgtagcctcagctacttgggaggttgaggtgggaggatcacttgagcctgggaggcaaaagttgtagtgagccaagatggcgccactgcactccagcctgagcgacagagtgaaaccttgtatcaaaacaaacaaacaaacaaacaaacaaacaatgatgtgttagcaataaagtgacagagagtctacagagggaacatgtacttaaacacattgctgaaaatgactgcaggaattttactttagattccaagttattgtccctttgagatacgtagtcgtgttcagtggataaactgctatgaggtcaatggcagtgaaaagtccttctgtccccacaagagcttctttttcttcttcttcttcttctttttttttttttttttgacagaagctttctctgtggcccaggctggaatttagtggcgtgatctcggctcactgcaacctctgcctcccaagttcgagtgattctccagcctcagcctcctgagtagctggcattacaggcgagtgccaccacgcccagctaattcttgtattttttagtagtgacagggtttcgccatgttgggcaggctggtctcaaactcctgacctcaggtgatccgcccacctcggcctcccagagtgctgggatgacaggcgtgagctaccatgcgggccaagtgcttattcttatcctccctgttaacagatacctgaaatcccttcattgaggtgtacaaaaggcttctaaagttcataataataagtattgttatttttgagaaaaagtctcgccctgtggcccaggctggtgcagtggtgcagtcacagctcatggtagcctcaaactcccaggctcaagcgatcctcctgcctcagcctcccaagtagctgggactacaggtgtgcaccaccatgcttggctaatttttttttttttttgagacggagtcttgctctgtcgcccaggctggagtgcagtggcgcgatctcagctcactgcaagctcggcctcctgggttcacgccattctcctgtctcagcctcccgagtagctgggactacaggtgcccaccgccatgcccagctaattttttgtatttttagtagagacggggtttcaccgtgttagccaggatggtctcgatctcctgacctcgcgatccgcccgccttggcctctcaaagtgctgggattacaggcgtgagccaccatgcccggcccttttctttttgatagagggtcttgctctgtcacccaggctggggtgcagtggcatgatctcggctcactgcagtctccacctcctgggttcaagtgatcctcctgcctcagcctcccgagtagctgggattacatgtgcccgccaccacatctggctaatttttgtatttttagtagagacgcggtttcaccatgttggccatgctgcctggctaattttttaaacttttttgtagttatgaggtcttgctctattgcccaggctgatcgggaactccagggcttgagcaatcttcccgcctcagcctcccaaagggcttggattaccggcatgagccacggtgcccggctccagcaggttttgataagagaagggggagtgatctctctcgagggcactagaactcccaagagtgataaacggggtgaggagaggcagagaggagtccagaagtcaaacatcacctacttgatccacccactgtgatggccctggaaaaaagcctccacggcaaatgctgaataaatattatgactgggatcactaaagccaagccaaggcaaacaacccctctaaaatccaacacagagcagataaaaggagatcagaaaaatgtagaggtcaagggcgagataattctagtagcacccagacagggacaggtaccgttatcggggtctcttcttgggccccgtggagcttggggacccggatccttctatggggtggggccatcctgggcactggaggttgctgagcagtgtccctggcctccacccaccccgcgccagggccacccccctttgttgtaacaaccacagatgtcctcagacatcacccagtgtcctcgggggagtgtaaaatcaccctgggtgagctcccctgggttaggggattccatggacccccaagagactgtatcccgtgatgctctgccctgctgaggtcccaggaggctgcacacattgaaatccatgccctgaatggggaaggagggaggaggtgaatcccaggatctggggttcccctggtttataccgtctgccctgttgggagtttattctggtgtctggtgtgagcagggaacccactcaattttttcccaaataattaatgcagtctttctcccccagatcccgtggctgtggggcaggattgctttctggggtggggccgtcctgggcactgtagggtgctgaacggcatctctggccttcacccattctatgccaggagcatctcgcactcgtgacaaccacagatgtcccagacattgcacagtgagtgtcctgagtttccgtccggaaggttgaggctgcagtgagtttttttttttttttttgagatggagtctcgctctgtcacccaggttggagaacagtggcaccgatctcggctcactgcaagctccgcctcccaggttcacgccattctcctgcctcagcctcccgagtagctgggactacaggcgcccaccgccacgcccggctaattttttttttcgtatctttaatggagacagggtttcaccgtgttagccaggatggtctcaatctcctgacctcgtgatccacccacctcggcctcccaaagtgctgggattccaggcatgagccactgtgcccggcctgctgcaatgagttttgatcacagcactgcactccagtctgccctagtggagggcaagtgcagtaatgtgagttagtgttggataaaagaaccatatcgtgtgtggcatatggtagccccttattgaattttgatttcatgaatacatatgagtgatccattgaaaaatataaaccaggccgggcgtggtggctcatgcctgtaatcccagcactttgtgaggccaaggcgggtgaatcacttgaattcaggagttcaagaccagcctggccaacatggtgaaaccccatctccaccaaaaatacaaaaattagctgggtgtggtggtgggagcctgtaatgccagctactcaggaggctgaggcaggagaatcgcctgaacctgggaagtggaggttgcagtgagctgagattgtgctactgcactccagcctgggcgacagagcgagactctgtcttgagaaagaaagaaagaaagagagaaagaaagatagagagagaaaagagaaaaaaagagagaggaaagaaggaaggaaggagggagggagggagggagagaaggaaggaaggaaggaaggaaaggaaggaaggaaggggaagggaaccaggatgtgaatttttttagagcaaggagggcacataaattacccctctcaacctagcacatggcacagtgtccagcaaacagaaagcttgatttagtctcctatttgctaaacttccaacagtgccctgctgtttagcacaaaccaaactccttgccacaacacacagggctttgcacgacctgccccgtcccctccctgccttcccctcctccctgccttcccctcctccctgtcttcctctcctgcctgtcttcctctcctcactctgctccagccacaggggtctcattgctgttcctccaatgcgctaggcacggacctgcctcagggcctttgcacaaactgtgcctctgcctgggacacctttccccagaccttcccagggccagttccatctcatccttcaggactgcactgaacatgtcattttttttttttttgagacagagtctcactgtcgcccaggttggagtgcagtggtgtgatctcagctcactgcaacctccgcctcctgggttcaagtgattctcctgcttcggcctcccgagtactggtattgcaggcatgtgctaccacacccatctaatttttatatttttagtacagatggggtttcaccatgttggccaggttggtctcaaactcttgacctcaggtgatccacccacctcggcctcccaaagtgctggcattacagatgtgagccaccacgcttggtctaatatgtcatctgctaaagggggactttgcctgggcacagtggctcatgcctgtaaatccagcactttgggaggctgaagcaggtggatcatttgagcccaggagtttgagaccatactggccaacacagtaagaccccatctctataaaaaaaaaaaaacaaaattagccaggtgtggtggtgcacgcctgcagtcctagctacttgggaggctgagacgggaggatcacttgaacccaggagttggaggctgcagtgagctatgatcctgccactgcactccagcctgggcaatagagtgagaccctgtcctccaccaacaccaaaaaaaaaaacaaaaaaacaaaacagggctcctctctcttggtagggggtggaggggaggtcagagacacctctcagccacccgggctgattcacaaatatcgaacattcactaaaatgtcaatacagtgacctagagccagaggggaagagggagggtacaagaggagagttccaggcagaggggcgagcaggtgagtaggtgcaaaggccctaagcaggaaccagtttggctccataaatatttgttgactcaatgaacgatagaagattctagagagaattgattgcacagaatcacccatggggactcagaggcggagtccaagctggtttcggagggggctgggggccggaggttggcaggtggggtgaaggatgggagccgctagctgctggcaggaaaactggcttcagtgaagatctggtctggtcctcttggtttgtttctgtccagggagtggacaggacccatgtaagggccctgggctatcccagaacccatctgggaattctgaagagaaaaagtcctgtaactggccgggtgcggtggctcacgcctgtaatccccgcactttgggagactgaggggccgatcacgaggtcaggagttcgagaccagcctggaaaacatgatgaaacctcgtctctactaaaaatacaaaagttagccgggcatggtgatggggacctgtagtcccagctactcgggaggctgaggcaggagaatcacttgaacccaagaggcagaggttgcagtgagccgaaatgagatggcaccactgcactccagcttgggccacagagcgagactccgtctcaaaaaagaaagaaaaaaagaaaaagtcctcataagtagggcagaggtcacggcagagtggaggtaccccagacttcgacctttgctcactgagggctggaaaaccacaaaacacccagataacggtcttccctcccctgctcctgcctgccccagtgtcactggccctcaaccctgtctctccaccctgtccaccaatcagcacctggaggtgggctgggagctgcctgtgaccgcttcagcatcttttgggagtggtgacagagccacagagggctgtgagcttgcccggccccaggtaacgctggcggtgggtgggcctccagcttggagcagagaccccccgaggcatctgcagacagaactggatggacccatgaatacggatttagctgctggaaaggtgagccctactaggtccccagggagagcgggagtctaggctgggaaagcctacccaagctgccagagctggaaggaccccatctccacccctattgtacagatgggaagactgaggcccagagaaaggatgcaatgagcaaaactgtgtgcctttgccccggggctgcccttgtctttcttccaggtccccctgcctcctaggagcgggcacttggggaggctgtgaaggcctgagaggcaagcggcatctctagctagggcctctctccagcactttttattttattttattttatttttatttttattttttgagatggagtctccctctgtcacccaggctagagtgcaatggcacgatctcagctcactgcaacttccacctcctgggttcaagagatcttcctgcctcagcctcccaagtagttgggattacaggtgtgcaccaccacgcccggctaatttttgtacttttcctagagacagggtttcaccatgttggctaggctggtctcaaactcctgacttcaggtgagctgcccgcctcggcttcccagagtgctgggattacagatgtgagccaccgtgcctgccatacttttttgttttttgaaacaaggtcttgctctgtgacccagggtggagtgcagtggggtggccatagctcactgcagcctcaacctcctgggttcaagggatcctcctacctcagcctccccagtagctgggacgacaagtgtgtgccaccgcagccagctaatttttttaaattatttgcagtagggataggggtctctatgttgcgcaggctggtcttgaactcctgggctcaagtgatcctcctgccccggcctcccaaagtgctgagattacaggcatgagccaccacatccagcctctccagcactttaagagaaattggctctcacactgtggaattctctctatcagcctcaaagtccagatttggaaagggagtctcagcgaggggcagcagctggcccaacccggaggcagagcggcaactgaactctagccggaaagagccagggttatgtgcacatgggaggtggggaggacaggggctgtatgtgaccctcacatctgttcctcgcgccccagatggcttctgctgcctgctccatggaccccatcgacagctttgagctcctggatctcctgtttgaccggcaggacggcatcctgagacacgtggagctgggcgagggctggggtcacgtcaaggaccaggtgaggagtccactgcagttgccccgggaccacagagctccaggcgggccaactgaggccccacgaaggtgctagacccgccagagcccagccagagctctgctcagctctacgatgcactaatgggtcacggtgcttgattttagccaagcacatcatttagcgggtagcatcagctccttcttacaggtggggaatggaggcccagagcagggtggaaactcatccaaagtcacacagcaatttggagttaggttcaaactcaaacttggggcatctccctggctaggttcggttctcttctccttcctctccttcctttctctctttcttcttcttttttttttttttgaaggagtctcgctctgttgcccaggctggagtgcagtggtgccatctcggctcactgcaacctctgcctcccgggttcaagcgattctcttgcctcagcctcccaagtagctgggattacaggcgcccgccactgcacctggctaatttttgtatttttagtagagatgggtttcactatcctggccaggctggtcttgaactcctgaccttgtgatccacccacctcagcctcccaaagtgctgagattacaggcgtgtgccaccgcgcccggcccactttcttttttttctttcttttctctctctttttctctttccttccttccttccttccttttttccttcctttctccctctttcttttactctctttttttttttttgagatagagtttcactcttgtcacccaggctggagcgcaatggcgcgatcttggctcactgcaacctccgcatcccaggttcaagtgattctcctacctcaacttcccgagtagctgggattacaggcagccgccaccacgctcggctaatttcttgtgtttttagtagagatggggtttcaccatgttggccaggctggtcttgaacttctgacctcgggtgatccacctgccttggcctcccaaagtgctgggattataggcgtgagccaccacacccggcccttttttctctttctttctctctctctctcgtttctctctctctctctctctctctctctctctctctctccccccctctctctctgtctctctctctctccccctccctcccttcctcccttcctcccttccttcctctctctctctctttcttagacagagtttcgctgttgttttgcccaggctggagtgcaatggtgtgatcttggcataccgcaacccccacctcccaggttcaagtgattctcctgcctcagcttcccgagtagctgagattacaggcatgtgccaccatgcctggctaattttgaatttttagtagagacggggtttctccctgttggtcaggctggtctcaaactcccgacctcaggtgatctgcccgccttggcctcccaaagtgctgggattacaggcctgagccaccgtgcctggctcttttgtttttctttttttcttttttttttttttttgagatggagtcttgctctgttgcctagggtggagtgcggtggcgtgatctcggctcactgcagcctccgtcttacgggttcagaatctccttcctcagactcccgagtagctgggactacagatgcccgccaccacgcccagctactttttgtatttttagaagaaatggggtttcatcatgttggccaggcggatctcgaactcctgacctcaagtgattcgccctcctcggcctcccaaagtgctgggattacaggcaggagccactgcacctggcactggctgggatttttatgctatgttactgcgtttgagcctcagcagccccgggaggaagaagcagtaactcatcttggagaagggaaggacacctaaggcccaaagagggtcactggtttccctggggccacacactaatctaaaaagagtgagcacttcctaattcctactacccctccctgtccaccccagcaggtcctgccaaaccccgactctgacgacttcctcagctccatcctgggctctggagactcactgcccagctccccactctggtcccccgaaggcagtgatagtggcatctccgaagacctcccctccgacccccaggacacccctccacgcagcggaccagccacctcccccgccggctgccatcctgcccagcctggcaaggggccctgcctctcctatcatcctggcaactcttgctccaccacaaccccagggccagtgatccaagtacctgaagcctctgtgaccatagacctgggtgagtcctgctgtgtctctgcccaccgccctcaccttgttccagggcccttcctgtaagtgaggaaatggaggcccagagagggctggcatcttgtccaaggtcacacagcaatttggagctgggcccagactcaaactcaggacacgtgtctcccttggctaggtgtttccatgctttcacgtggatgctattgggagcccattttccagatcgtgaaacagtcctgtcaggttgagcaatgagctaaaaccacagagctaggatgcaaccccggcaggtggctcaggcaccaggcatggtgctgacaagcacagcccaaagtcagggtcttgccttctacgtgtctgtaccccgtgcctggttcctagtagatttttttttattttttatttatttttattttttgagacagagtttcactctgtcacccaggctggagtaaagtggcgcgatctcggctcactgcaacctctgccttccaggttcaagcaattcacctgcctcagcctcctgagtagctgggatcacaagcatatgccaccatgcccagctaatatttattttttagtagagacgaggtttcaccatgttggccaggctggtcttgaactcctgagctcaggtgatctgcccacctcagcctcccaaagtgctgagattacaggtgtgagccgctccacccagcctgtagatgctcaataaaagtgcatgaggttaccaggtcctaggttccagggtgctcctcctagacgtggggaacagcagatcagtaatgatttactctattgattaagcattcccggcgggccaggcagagccctggctggagatacttggcctctgggtggcctttgtcccttgacccttgctatgagctcttcttggtcccattggagagttgacaaaactgaggctcaggcccggagcggtgactcatgcctgtaatcccagcactttgggaggctgaggcaggcggatcacttgaggttaggacttcaagaccagcctggccaacatggtgaaaccccatctctactaaaaatacaaaattagccgggcatggtgggggccacctgtagtcccagctactcaggagcctgaggcaggagaatcacctgaacccgggaggcggaggttgcagtgagctgagatcatgccactgcactccatcctggctgacagagccagactctgtctcgaaaaaaagccaaaaacaaaaaatgctgggcacagtggttcacgcctgtaatcccagcactttgggaggccgaagcgagcggatcacgaggtcaagagatcgagaccatcctggccaacatggtgaaacctctgtctctactaaaaatacaaaaattagctgggtgtggtggcaggcgcctgtagtctcagctactcgggaggctaaggcaggagaatctcttgaacctgggaggtggaggttgcggtgagccaagattgccacactgctctccagcctggcgacagagcgagactccgtctcaaaaaaaaaaaaaaaaaaaaatctgaggctcagagaggtgaagtcacttactcaaggtcacacagccctgcccaaccaggattagaaccaagggttacctgacccaaagtttgtgtgctgggacagcatgcctactgcatgccggctaccaggaggggacaaccagaggtgaatcagacctcgtccctgccccttgggtgagataacgcctggctggctgcaaatctagcctgtaattctgtgtgataacagccactcccttttgaatcagccggtgtctcctgacaatgtcctgtgtcttcctcagccttgtgggacggacagaaccaagccctgttgaatttgggtccccatcttttttttttttttgagatggagtctcgctgtgtcacccaggctggagggcagtgccacattctcagctcactgtaacgtccaccacccgggttcaagtgattctcctgcctcagcctcccgagcagctgggattacaggtgcacgccaccaggcccggctaatttttgtatttttaatagagatgggatttcaccatgttggccaggctggtcttgaactcctaacctcagatgatccgcctgccttggcctcccaaagtgctgggaatacaggcgtgagccaccatgactggctgggttcccatcttatagcagaggggagaccgagtcactagtgagggctgcccccttcaactcaggccttggggactccaaactctggcagaagtcatatgaatgttgggattaatcatgggagacttggtggaggaggcggttagaggctggaagctcaggactccccccgtctgacactctccctgtctccgtccccacctgccctggtcagaaatgtggagcccaggaggaaggatctgtgctgagaagccggctgatccggtggacctgtccccacgatgcaatctcaccgtgaaagacctcctcctttcgggcagcagtggggacctggtgagcacccccacaccctcccatggggcgttggagctgggagggctgctcgggttcgaggagcctaaatatccccgtttcagagactggaaaactgagtcacagaaaggcgtggaatttgcccacagttagagaccattccagtcctgggctcactgtcgcctgggctggggtgtcttcctctgtagtacttagtagtaacaatagcaacaacaactaaaagctaaaactggctgagtgtggtggttcacacctgtaatcccagcactttgggaggccaaggcaggcagatcgcttgagctcaggagtttgagaccagcctgggcaacatggtgaaaccccatctatacaaaaaatacaaaaattagcctggcatggtggcacatgcctgtggtcccagctactcgggaggctgaggtggaaggatcgcttgagcccaggaggtcaaggctgcagtgagctgtgattgtaccactgcactccagcctggccaacagaccaggactgtctcaacaataacaacaacaaaaagaacaaagctaaaactgaggctgcacctgctatatgccaggcgctctttatttatcatcttaaaaaagttttttttgagacaggatctcactctatcgcccaggctggagtgcagtggcgcaatcctagctcactgcagcctcaaactcctggcctcaagcgatcctcctgcctcagactcccaagtagctgggactacaggcgtgcaccaccacacccagctaatttttcttgtcttttttattttattttatttttctgagacagaatcttgctctgttgcccaggctggagtgcagtggtgcaatctcggatcactgccacctctgcctcccgggttcaagtgattctcctgcctcagcctcccaagtagctgagattacaggcatgcaccaccaggcctggctaattttgtttttcttttttctttttttttttgagatggcgtcttgctctgtcacctaggctggagtgcagtggcgtgatctcggctcactgcaagctccgcctaccgggttcacaccattctcctgcctcagcctccccagcagctgggactacaggagcatgccgcgccacctgtctaatttttcttttcttttttttttttttttttgagacggagtcttgctctgtcacctaggctggagtgcagtggcgtgatctcggctcactgcaagctccgcctaccgggttcacaccattctcctgcctcagcctcccgagtagctgggactacaggcgcccgccaccacacctggctgattttttgtatctttttagtagagatggggtttaactgtattagccaggattttttttgtatttttagtggagacagggtttcatcatgttagccaggatggtctcgatctcctgacctcgtgatctgcccacctcggcctcccaaagtgctgggattacaggcgtgagccaccgtgccccgtttagacccagctgatttttcttttaatttttttctgtagatatgggtcttgctatgtttcccaggctggtcttgaactcgtagcctcaagtgatcctcctgctttgtcctctcacagtgctggattataggcatgagctactgcgccccgcctggggcttttattatcttaattttacataggagaaaaagggcacagagaggttcagtcatttgcccaatgctacacagctgatgcaggcttgatccctgggatggtctattgagcttatggtgcccattgcacaccaattgaaggccatctaccctgccaagggcttcacgctcccataagccaggtttgacaacccaaacccattttgcagatgagaaggtaggtcaaggcccagagaggttaagccatgagccctaagtcacacagcatgcaagtggcagactcagggttttgaaatcctgtttctccaatgccaaaggttatcctgataatctctagtgaaggccagggtgcccctggcaactagagggatatgcagtgagcaccagctgtgtgctcagcctctaggatctgatggtcaggatggggcgatgtactgttcattaaggtgtacagaaaagaaagagagcctgcagggtcactgcagatccaggaaggcttcccggaggaggcagtacttcagcaggccatgaaggaagggaaaggagaatgaacgactgctttggcaatgataactggcttattttgttttattttatttgtttattttttgagacagagtcatggtccgtcgtccaggctaagtgcagtgccacagtctcggctcactgtagcctccacctcctgggctcaagtgattctcatacctcagcccccaggtagctaggactacaggtgcctgccaccatgcccgactaatttttgtatttttagtagagacggggtttcaccatgttggtcaggctggtctcgatctcctgacatcaggtgatccacccgcctcagcctcccaaagtgctgggattacaggcatgagccactgtgcctggccttattttattttatttaaagtcaaggtttccctctgtcaccacaactgcctcaaattcctaagctcaagtgatcctcctgcctcgacctcccattttttttgtatagctgacatacagaacaacgatacaaaaaaaaatgatgcatttataaatgctagttatcagcagttgaagaccagcctgggcaacatagcaagacctcgtctctacaaaaaaaaaaaaaaaaaattagctgagtgtggtggcgcacacctgtagtcccagctactcaggaggcagaggcaggaggatcacttgagctcaggaggtcaaggctgcagttagctatgatcacacgactgcactccagcctgggtgacacagtgacatcttgcatcttaaaagaagaaaagatgggtgtggtggctcatgcctgtaatcccaggaatttgggaggctgaagtggacagattgcttgagcccaggagtttgagaccagcctgggcaacagagtgaaaccccatctctacaaaaaattcaaaattagccaagcatggcggtacgctctgtggttccagctactcgggaagctgaagctggagaatcgcttgagcccgggaggcggaggttgcagtgagccaagagagcaccacggcactccaacccgggtgaagtagcaagaccctatttcaaaaataataatagtaataatacaatgaaaagaagaaagctgtcaaaagggccgggcgcggtggctcacgcctgtgatcccagcactttgggaggccgaggcgggcagatcacgaggtcaggagatcgagaccttcctggctaacacggtgaaaccccgtctctactaaaaataacaaaaaattagccgggcgtggtggcgggcacctgtagtcccagctactcaggaggctgaggcaggagaatggcgtgaacccgggaagcagagcttgcagtgagccgagatcgcgccactgcactccagcctgggcgacagagcgagactcgtctaagaaagaaagaaagaagaaagaaaagaaagaaagaaagaaagaaagaaggaaggaaggaaggaaggaaagaaagaaagaaccctgtccatatgccattttgcgcgtgtgtgaggatatctgtaggactgatttctgaaggtagaatgacccggtcaaaggaccgtgtgttggttatttcgagccctgctgccaagggagattctgtggtggcaggagtgatagtttttgttgttgctgttttgagacagaatttctgtcgcccaggctggatctcagatcactgcaacccctgcctcccgggttcaagcggttcttctgcctcagcctcccgagtagctgggattgcaggcacgtgccaccacaccaggctgatttttgtatttttaatggagacagggtttcaccatgttggccaggctagtctcgaactcctgacctcaagtgatccacctgcctcggcctcccaaagtgctgggactacagacgtgagccaccttttctttttttttttttttgagacagagtcttactctgtctctcaggctggagtgcagtggtgtgatctgggctcactggaacctctgcttcccgggttcaagcagttctcctgcctcagcctcctgagtagctgggattacaggcgccgccaccatggtcgggtaatttttttttttttttttttttgagacggagtctcatactgtcactagggctggagtgcagtggcacaatctcggctcactgcaacctctgacttctgggttcaagcgattctcctgcctcagcctcgcaagtagctggtattacaggcacccgccactacgcccagctaactttttgtatttttagtagagacggggtttcaccatgttgaccaggatggtctcaaactcctgacctagtgatttgcccacctcggcctcccaaagtgctgggattacaggcatgagccaccgcacctgggcaatttttgtatttttagtagagacgaggtttcatcatgttacccaggctggtctcgatctcctgagctcaagtgatccacatgcctcagcctctctaagtgctgggatgacaggcgtgagccaccacacccagcctggggtgatagtgttttcgatctgatacctctttcatttcctgaaggcagttggcgtccctgcacccgccgtcattcctctgattttttccgtagcaacagcatcacctgggggcctcctacctcctgcgacctggggctgggcactgtcaggagctggtgctcaccgaggatgagaagaagctgctggctaaagaaggcatcaccctgcccactcagctgcccctcactaaggtgagtctggggggacttccagccctggatccatctccccttcgtgcacttacctgcatgtgtgtcccacctttatttatttatttagagtagagtctttctctgtcactgaggctgggatgcagtggcacgatctcagcttgctgcaacctctgcctctcagattccagcgattctcccgcctcagcctcctgagtagctgggattacagccatgcgccaccacgcccagctaatttttgtatctttagtagagacagggtttcaccatgttggccaggctggtctcgagctcctgacctcatgtgatcctcctgcctcggtctcccaaagtgctgggattccaggcgtgagccaccgcactggctatgtgtctcacctttagaacacccgtactagaatgctatgctgtgtctgtcaccagagccaaaacaatcagtcagaagccccattgtaaattcaactcagagggtaattatcaacatccaggaatgaatggcggactccaggtggcagcaatttgggtgcagcaaacttttttttttttttggagatagggtcttgctgtgtcccgctggagtgcagtggtgccatcatagctcacttcagccttgacctcctgggctcaagagatcctcccgcctcagcctctcaagtagctaggatgacaggtgcacgccactacacttggctaatttaattttttttttttttttgtagaaatggggtcttgttatgttgcccaggctgggctgggactcctgggttcaagtgattctcccaccttggcctcccaaagtgttgggattacaggcatgagccatcatgcctggccctgcagacatgttttgattggactgtactgcattttatacatttttgaattgcttgataatgtttttctgaccggtagattttacaagagaactcagtgacttgaggctgggcacggtggctcacacctgtaatcccagcactgtgggaggctgaggcagaggatcacttgaggtcaggagttcgagactagcctggccaacatggtgaaaccccgtctctactaaaattacaaaaattagctgtgcctggtggtgggcaactgtaaggtgcttctcagcctcccagcttctcaggaggctgaggcaggaggatctcccttgaacccgggaggtggaggttgcagtgagccgagatggtaccactgcactccagcctgggtgacaagagcgaaactctgtcaaaacaaaaacaaaaacaaaaaaactaaaaacataaacaaaacaaaatccaaaaaaccaactcaattacttgaatgtcctctgtttcatattctcaaacctccatatgcaccagtcaatggctgggtagctgtttgggttctctagctaaccacagtccccacccagcctgctgcactcagtatcaatgcctgagtttgatattctcatctgttttttttttttttctattgagacaggttctgactctgttgcccaggctggagtggagtgaggtgatcttggctcactccaacttccccctctggagtacaagtgattctcccacatcagcctccctagcagctgggactacaggtgtatgccattatgcctagctaatttttttttttttcctgagacggagtttcgcttttgttgcccaggctggagtgcagtggcgcgatctcggctcactgcaacctccgcttcccaggttcaagtgattctcctgcctcagcctcctaagtagctgggattacaggcacgcgccaccacgcctggctaatttttttttttttttttttttttgagtagagacagagtttcaccatgttggccaggatggtctcgatctcttgaccttgtgatctgcccagctcagcctcccaaagtgttgggattacaggtgtgagccactgcgcccagcatttttttttttccttagagacagggtcttgctatgttgcccaggctggtctcaaactcctggcctcaagcagtcctctgaccttggcctcccaaagtgttaagattacaggtgtgagccaccgtgcctggccccatctgtttctattgttgttgttgtttgttttgagataggatctcactttgtcgctcaggctggagtgcagtggtacaatctgcaggtagcagctaactgcaaccttgaactcctggtctcaagggatcctcctgcctcagcctcccaagtagctgggactataggcatgcaccaccacacccagctgattttgtggttgttgttttgttttagtagagacagggtctttactaaatgttgcccagtctagtcttgaactcctggacttatgcgatcctcttgccttggcctcccaaagtgctgggattacagcactgtgaaccaccgcgcccagcctgacattcccatttgaagacacttattggccgggtgtggtgtctcatgcctgtaatcccagctctttgggaggcaaagatgggcggatcacctgaggtcaggagtttgagaccagcctggccaacatggtgaaaccctgtctctactaaaaatacaaaaattagccaggcatggtgttgtgcacctgtaatcccagctacttgggaagctggggtgggagaatcacttgaaccctgggggtggaggttgcagtgagctgagatcttgccactgcactccagcctgggtgacaagagcgaaacaagaaagaaagaaagaaagagagagagagagagagagagaaaaggaaggaaagaaaagaaagaaagaaagaaaggaaaagaaagaaaagaaagaaagaaaggaaagaaagaaaggaagaaaagaaggaaagaaaggaagaaaaggaaagaaagagagaaagagaaagagaaagagagaaagagagaaagggagaaaggaaggaagggagggagggagggagggaggggaaaagaaaggaaagaaaagaaagaaacgtaagaaagaagaaaaaaattattaattagtcttaaaacacttgctgtcgccagggaaaggtgatgtttccagggatggccacaaggtggtggagtggtacccatgcccaaagtctggtgggcagttgcccattttacagtattgggagctgggaaaagaccctcagaacccaggcacctcccagagactctgtgagggtttgggcaaagggtagcttcaagtcattaggaatctgcctctgggtccttggctccgggatgtcttgtatgcaaagaggatggggtgaagttgtggggtcgaggttaggtgaagtggggtcaggacagtggggactgtcgcaccatccccaaagtgaagactttaattttttaattttaattattttatttatttatttatttatttatttatctatttatttattgagatggagtttcgctcttgttgcccaggctggattgcaatggcacgatcttggctcactgcaacctccgcctcccgggttcatgccattctcctgcctcagcctcccgagtagctgggattacaggcacccgccaccatgcctggctaatttttgtatttttagtagagacggtgtttcaccatgttggccaggctggtctcgaactcctgacctcaggtgatacgcctgcctcggcctcccaaagtgctgggattacaggcgagagctactgcccccggactccaagtggggactttctggcctgaaaccctcctccccatttcacttggcagtacgaggagcgagtgctgaaaaaaatccgccggaaaatccggaacaagcagtcggcgcaagaaagcaggaagaagaagaaggaatatatcgatggcctggagactcggtgggtagtgctggacccagactctacactcgtggaggaaactgaggcccagagagaaggagatgtggctaaggccacacagcttagagtctgacaaaattggaggtgattctcctctctgggagagatcatgcttcttactgattgcagggatggaaagatgcctagtgatggtgtaggacaagggtttgggggaccctttgccccctagaaggtgtgcggaaaaaggacaaagtgtgacccatcctattctgaccctctgcctgaagatagacacttcctttttgtgtgtgtggaagggtctccttctatcacccaggctggagtgcagtggtgcgatcttggctcactgcaacctccacctcccgggttcaagcgattctcctgcctcagcctctccagaagctgggattacaggtgcatggccaccacgcccagctaatttctttgtatttttggtagagatggggtttcactgtgttgcccaggctagtctcaaactcctgacctcaggtgatctggccgcctcagcctcccaaagtgctgggattacaggcgtgagccactgcgcctggtctctcccctttcttaaatgcaatctgctaagctcctgatcatctttatccagggtcattccccccaccaccctatgtcctgggtaattgtatcccattttacagacacaaaagctgagatcagagagtggagtggcccaaggtcatggggagagggagagatgaaacttgaatctcggccgggcgccgtggctcacacttgtaatcccagcactttgggaggctgaggcaggcggatcacgagttcaggagatcgagaccacggtgaaactctgtctttacaaaaaatccaaaaaaattaactgggcttggtggcgggtgcctgtagtcccagctactcgggaggctgaggcaggagaatggcgtgaacccagaaggcagagcttgcagtgagtcgagattgtgccactgcattccagcctgggcgacagagcgagactccatctcaaaaaacaaacaaacaaaaaaagaaacttgagtctcccaggatgcctggttgtcctgatatttcatcttctggaaacatcactgcctgaatctaggaggctcagcttttttttttttttttttttttttgacacagagtttcattcttgttgcccaggctggagtgcaatggtgcgatcttgactcactgcaacctccacttcccgggttcaatcgattctcctgccttagcctcccaagttcccaagtagctggaattataggcgcccaccaccacacctggctaattttgcatttttagtacaggcagggtttcaccatgttggccaggctggtcttgaactcctgacctcaggtgatccgcccaccacggcctcccaaagtgctgggattacaggtgtgaaccaccacacccatccagggggctcagctttgaatgaagccccctccatattaatgcagaaatgggacctaggaaccaggcagatgtgggttcaaatcccagccctgtctgacctgccgagtaaccttggatgaatgacttcccctctctggccttgggttctcttggcttgtaacgtgaggcctctgggggagatgtcagtggggccagctggtgactggcatatgctgaatgtcgatgcgtcttcctcctttcaggatgtcagcttgcactgctcagaatcaggagttacagaggaaagtcttgcatctcgagaagcaaaacctgtgagtctgggtccagctggggcagaggacaggggaagcagccccagagtccctttgcaggaagagcagagagcccatgtgatggcagaatgacatagggaataagagttttacctatgggccgcgtgcagtggctcacgcctgtaatctcagcactttgggaggccgaggcgggtggatcacctgaggtcaggagttcaaaaccagcctggccaacatggtgaaaccccgtctctactaaaaatacaaaaaaattagccaggcgtggtggcgggcacctgcagtcccagctactcgagaggctgaggcaggagaattgcttgaactcgggaggcggaggttgccgtgagccgagatcgcaccactgcactccagcctgggtgacagagcaaggctctgtctcaaaaataaataaataaggcctggtgtggtggctcacgcctgtaatcccagcactttgggaggctgaggtgggcggatcacaaggtcgggagatcaagaccatcctggctaacacggtgaaaccccgtctctactaaaaatacaaaaaaaattagctgggtgtggtggtgggcgcctgtagtcccagctactcgggaggctgaggcaggagaatggtgtgaacctgggaggcggagcttgcagtgagctgccatcccaccactcactccagcctgggcgatggagcaagactctgtctcaaaataaataaataaataaataaacaaataaataaataaataaaataaataataaagagccagaggcccttgaagaatggatggaatttggactttagcggggctgggggaccccggaaatggacgagaagcagaaccgaggccctttagggctcagcggaggcctgcctgtctctctaaggtccctcttggagcaactgaagaaactccaggccattgtggtgcagtccaccagcaagtcagcccagacaggcacctgtgtcgcagtgagtcctggtgcccccaggcaagccggggacctaggcttctgtagaggggcccatagggaggtgacaatgagtccaagctctccttgtgccccagctcaagtatgatccagtctggtctttggggcctcagtttccctgcctgtgggatggagatgcttgcaggggaggggagggagggggtgactctgccgctgtctccaccaggtcctgttgctgtcctttgccctcatcatcctcccctccatcagcccttttggccccaacaaaaccgagagccctggggactttgcgcctgtacgaggtaggggatccccacctttgaaacccttgtctggtctccccaagtccccgtcctgggcctctgggggagggggagaagacccctgtgcccttgttccctgaggctgggggccagggaagggagcataggaccccacctccaccttgtcccctgtgatgccccccttccccaatcagtgttctccagaactttgcacaacgatgctgcctcccgcgtggctgctgatgctgtgccaggctccgaggccccaggaccccgacccgaggctgacacaacccgagaagagtctccaggaagccccggggcagactggggcttccaggacaccgcgaacctgaccaattcgacggaggagctggacaacgccaccctggtcctgaggaatgcaacagaggggctgggccaggtcgccctgctggactgggtggcgcctgggccgagcactggctcaggacgtgcagggctggaggcggcgggagacgagctgtgagccccgccaggactatgctcccaggcccctctgcccaggggtgccttggggatgctgcactgggcagctacccacctggggatgggacgtgaggccaagaccccagcagagatgccagaatgggggaggcacagctcatagccacacacccagggcctgactgaggcccacgcaggaaccgacactcagacacaaggcaaagagggccacaggacccgggaaatacacacagagccaggagcagaagcaaagagcagacacacatacagcctgaaacagacctggacagacagacacagcctgaaacagacccggacagacagacacagcctgaaacagacccagacaaacagacagacagacacagcctgaaacagacccagacagacagacagacagcctgaaacagacccagacacagcctgaaacagatccggacagacagacagaaacagcctgaaacagacccagacagacagacagacacagcctgaaacagacccggacagacagacagacacagcctgaaacagacccggacagacagacagacacagcctgaaacagacccggacagacagacagacacagcctgaaacagacctagacagacagacacagattgaaacagacccagacaaacagacagacacagcctgaaacagacccagacacagcctgaaacagacccggacagacagacagacacagcctgaaacagacccagacagacagacagacacagcctgaaacagacccagacagacagaccgacgcagcctgaaagagacccagacagagagacaggcagacacagcctaaaacagacctggacagacaggcagacgtagtctgaaacagacctgaacagacagacagacgcacacacacaacagatgcgcagcaactccccgcccagggacccctcccggcctccctcgcacactgggaggaggaagccgccgagactgcagggagcctggccccggagccccgggtgcgccctggtctttggagcagccacggcccacaatcaccccccttttctaagactgcctgatccgaaataaagtattttgacagaaccttgttttggtgtggaggcggagtctggggctcctcgactccccagaaggaggggctgggccagcctgggatgggtgagtgaggtgtgggctccacacccccgccagatgcccgcgctggagcagcggagggagaggcgccgggcacgacttcagcaccttggagagcggcggcgggcggagtgcggggaggcaggcgtggcgcttccaaggtgtcccctccggagttgcggggaaggcagctgccttcccggggatctgggcggcccaccctgctcattttgcgggcgaggacaccgaggcgtcggaagtggagggactgcctaaggtcacagctggggagagtggaacccggctgctcctgcgctcgtctgtggggtcgcccccactgcgggctgtgcgcgcctgcccgggcgccatcgcaaaatcgcgcccaaagcacaggtggggactcatagcctgggggtaaatgttaaacaacaacaaaaagcatgtgcataagtgtataactacaaactgagtgctcagaaaatgccagctgccttattggcttcatcatcagaaaactggcctgatccctccagaggcggggtggggggagaggtgagcccttgttcctcggcccccaggcttgaggggcagggattgcaacggagcccaagcagctggtccagggaggaggggaccacgaactcctgacccaggggggcgaggacctgccacaaatagggaatttaaacactcactgggcacagtggctcacgcccgttaagtccagcactttgggaggccaaggtggcctgactgcttgagcccaggagtttgagaccagcctgagtcacatagtgagacccccatctctacaaaaaatgcaaacaattagctgggtgtggtggcacacacctataatcccagctactctggaggctgaggcaggagaattgcttgaacctaggaggcagaggctgcagtgagctgagatcacgccactgcattccagccttggtgacagagtgagactctggctcaataaaataaagtaaacacactgagatgcaagaaagaaattgtttttattgcattgaggacttttccagaagcctggtggacccacgtctccctccagccccaaaggcagtgcaagcctctactgatcccccacttcaaggtgggtctcccctcctgcagggcccatggaggaggggtagggtgggctgtagggggcccagaagggaggccctggggacagagggagttcactcctgtttaagctggagaccagggagggcccagcctcacctctggacaacacagcaagtcagaggctggggtgtggcaggggctcacctgtcacctctggggtgtggcttcttcccggaaccgcaccagaggcccctggagcccagggagggaccacggagggcaggtgtaacccctggcctggagcacagctctcagagccctgaggctcccggggacagaaacaagtaacaaagtgagaccacgagagaaaaagaatccacagtttctacaaaaagccccaccctccccaagcaccctggtcagctggggaccgccttggccttcacccttttggggggtctgtggggggcagggctggtgggccgctcccgtttggggctggcgggctctgagccgttgtgctgggcgcagggctcctgcttggggccggcggggatagagccgttgatccgggtgggagattcctccttgggctccagcttgggggtgggcgggcggggcaggggtggcagcgccctctccagcacacgggggccgtcccaggcggggatctccagccccaggtgcttcatgagccgggtcatgacctcgtcaacgtagccatggatgcggaggtcagcatggcggtcctgccgaggggcgggacgggtcaggcgtgggggacagagggtgcatggtggccctgggcaggggtaggctcagacacctacgtgcttggtgggctgcaggttgacgatgaccaggcggcctccccggcgcttggtagccagcggcaggttcccgctgggccggatctgcagcgatgtacccagcgtgatggacaggtcggcgttcctggggccggggagcgtgggctgagcctgatgccctgctcctgccaacatcccgagccagccctgggggccggttcacacctaggccatctgtgctcaccggggcggtcaaggccagccccactcccgagtcagcctttgggatcccgccctgccctcctctgcggtccgttggcggggtcattgatctgggcgggcccttagacacttccggggagtatcacagtgtggtaagagcttggacacctagggtgggaccctggctcggtcacctcccggctgggcagcactggatagaggagacacctggcggaagccttggtttccttgtgtagcacccacccagagccatgaggtgacgagtgtgtgtgagtgcgtgtgtgcagcccctggcctggcccacctgctccaggaagcctcccctcactgcctgtgagcctcagccactgtcccatgctggagctggctgtgtttctgctgtcgtcccgccccgccccaccatgggctccctgggggtggggggtcagacctgctggcctcatcggcgagtgccaggtcccggtcgggcagggagtcctcccagtctaggatggtgtccctcagctctcccctgcaatgaggaagctgaggagagtcctcaggggcctcgcagcctcccctggagcccagggcatgggtgggggtggctcacctgcaggctcgcagcccccttgccttagccacggtgcagagccggcccgtggccttcaggcccatggtgcccacgactgtgtctcggacgtactgcctgtgtcagggaggaagggggaggatgggaccaggtgagctcccatgggtgactctcgcactgtttctagggtgacgttctcccagggaggtggggggtggacaggtgaccagaactagcacccagcgacacggaacgagtagccttccatgaataacgggctgggatgctgctcggtgcccggagcacagaaaacaaagcaggaaactgtcccagacagacgaaggggctcgagagacaagacccagcatgggatcccggaccaggagaaacaggaacaattggagcatgggggcgacaggccgagtctggattcgggattagagaaggcgatgtccactttacttttcctgactttaatcgttatactgggccgggcgtggtggctcacgcctgtcatcccagcactttgggaggctgaggcgggcagatcacaaggtcaggagttcgacaccagcctggccaatatggtgaaaccccgtctctactaaaaatacaaatattagccaggtgtggtggcgggcgcctgcagttgcagctacttggatggctgaggcagaataattgcctgaacccgggaggcggaggttgcagtgagccgagattgccccactgtactccagcctggatgacagagcgggactgtctcaaaaaaaaggagaaacacagagataagaaggcccctgtggctgtaggtccaggaccaccaagggtggctggctgccaccagcagccaggaaaaggcaggaaaaatcctcccctacaggttgcagaggggcatggccctgcagacacctggattttggacttctggtccccagaactgtgagatcacaaatttctattgttctacgctgctcatctgtggcaggttgctacagcagtgccaggacacggatgtaccccccacaggagggaggcacggcccccccaaatccctccaggaggaagacatgccccccaaatccctccaggagggagacatactccttatatccccccaagagggagacacgcccccagatccccccaggagggccacaccccagtccccccataccctctgggtctctgggacatcggattcgacccccaaccccctctggcagagcccccacccctgcacccaggtggcactcacgtcttacacttggcacattcttccacaaacatgttcccgtggagctctgccagtttgtccctgtgggaagagcaggaagaggcttgatggtgggaaaggatccctggatgcccaggctttggagctggtgctaagcccctctcctccaggaaggcttcccggactcctctcccacaacattgatcaactccttctttctggctcttctagctcctggctccaccattcatctgctgtgcatctctgggcaagtggaccaacctctctgagcccaaggaatcattaacccccaaggctgaacccaccttagataacgggaagccctttccactcacaaaatgcccgtccccctccgagagcatatgggaacctcttgatgtcaccaggtcagaagcacaggaattcaaattcccagtttataatggaagaaaccgagacattgaatggccctgaagcatgagatccaatcccagctttattttatttatttatttattttgagacagagttttgctcttgttgcccaggttggagtgcaatggtgcaatctcagctcaccacaacctcaatggcacaatctcagctcaccacaacctctgcctccggggttcaagtgattctcctgcctcagcctcctgagtagctgggactacaggcgcccgccaccacgccgggctaattttttgtatttttagtagagacagggtttcaccgtgttagccaggatggtctcgatctcctgagcttgtgatccacccgcctcggcctcccaaagtgccgggattacaggcgtgagccactgtacccagcctaatttttctgtttttagtagagacggggttttaccatgtggccgggatggtctcgatctcctgacctcatgatccgcccgccttggcctcccaaagtgctgagattccaggcataagtcaccacacctgaccctcctttgcttttttttttttcaagacagagtcttgctctgtcacccaagctggagtgcagtggcgccatctcggctcactgcaacctctgcctcccgggttcaagcgattctcctgactcagcctcccgagtagctgggattacaggcatgcgccaccacgcccagctaatttttgtactcttagtagagatggggtttcaacatgttggccaggctggtctcgaactcttgacctcgtgatccgcctgcctcggcctcccaaagtgctgggattacagatgtgagccaccatgcccggcccctcgtttgcttttataagcagagaaaaatctcttcctcacccctcacccctggctgccgagctcctcgtctcaacaactgacctggctgtcattggttgccccaggggtgagacctggcaaagaggggcaggggagggccacacttttattgggaaatcagcctgccccagagcacaggttcacttcagtgtcagacacgtttagtgtcagattaataaagatggatattaaaaacacaacaggccaagcgtggtggctcacacctgtaaccccagcactttgggaggctgaggcgggcagatcacctgaggtcaggagttcaagaccagcctggccaacatggagaaaccccgtctctactaaaaatacaaaattagctgggtgtgatggcgcatgcctgtaatcccagttactagggaggctgaggcaggagaatcgcttgaacctgggaggctgagcggagatcacgccattgcactccagcctgggcaacaagaacgaaactcggtctcaaaaacaacaacaacaacaaaaaacaaactgcaacttctagaccctgacagctctcctccccttagccccatctcgagggaaattctgcctctggcctcagccgggacagctctgagccatgggactcagagatctccacacactgggccaagaactcagggctagaatcttatagaaccaggaaaaggggactctccccctaaaaatgcaaacacggtttgtggggccccaagctcttttgtgggggcggggccagggtgttacctggggaagcctgagcgcacatggagcccgtccacgttctggctgaccaggaagcggaggaggcccacgcgctccagctgcaccagcgccatgtgggtctgcgtgggccgcgcgctctcaaaggtggtgtcgaacttgggggccagacctcgctcctccatggtccagactccgtggggacccctgaaggtggcaggccgggagagatggacggggagaggggaacagaaaaagagacagagggagaatcagagaggtatagagagaaagttggagagagagaaaatcaggagacagagagagacagggagacagagagagggaatcagaaacagaaatagagggtgagttgcaagaacagggagagggggatagaacaagacacagacagagagataaagagttaaagacaaagcaagtcagagacagaattggagagagacagagagagggagaggcagagagagagagatgaattcacacgaaggcaaaaatgacttattctattcaaccaacactgctgctgcaatgagcccgacgatgctcacatgggcccaagccctgccctccagaagcccttgatcttgggggagacaggtggacacagatcctctggccccaagagtcaagcctggatcagaggaggtacctgggcctggggaagccccgtggaggtgggggccctggggcacgtggaagggcttcctggaggaggctaagcagtttcttgaagggtgagagggaagatcagacagaaggggtaaacaaaggcctgggtgctgggaagagcccatgagtttaggagaaaatgcaagtgttttgggggctgcagcaggagcaggaggggctgaagttggagaggtgattcagggctggggcaggaagggcttcagcttccagcacaaggtattcagaactctacactgcctggcaatggggagccacagcaggttatggaagaggagaaggaggagaaattcacgccttggctttttttttttttttttttttttttttttgagatggagtctggctctgttgcccaggctggagtacaatggcatgatcctggctgactgcaacctctgcctcccgggttcaagcgattctcccacctcggccttccaagtagctgcgattacaggtgcctgccaccacacctggctacgcttgcaaatatgaaagactacatttcccagcaacccttgcagccaggtgtgatcaggtgaccgtgttctggccaatgaggtgagtggaatgctggttgtgacaagggacacatctttttgttttgtttttagacggagcctcactctgtcgcccaggctggagtgcagtggtgcaatctcggctcactgcctccacctcccaggttcaagcaattctcctgcctcagcctcccgagtagctgggactacagatgtgtgccaccacaactggctaatttttgtatttttagtagagacagggattcaccatattggccaggctggtctggaattcttgaccttgtgatccaccatgcccagccaagggacacatcttaaagggagtacccaggacacatccaggaggaaagcagatggatgtgttctcattcccagatgtgtgtggctcgcagggaagcctctggcagcctggtaggccttgcctcgacttcccctgcacaatcacagacctgaagtcggggatgccagaggcagtgctgatgccggcacccgtgtggaacaccacactggaagactgccagaccagcctcgccagttcccacaccttccgctccagctcctccggggggtcgaagatctgtggggggagagagcagacggaggggtcaaaacagttcccccaagtggcaaggccacgcacgagccacagactgagctgtccctgtcttgcctgagggaggaaaatggattggaaaaggcagcttgtcctcatgcccctcctcttcctacaaccttccatgcctcccacctgccttgtcaaagccctagcccttcccacggcccaccaggccctgcactacctcccttgccccctccctgccctcttctcctccctctccctgcctcactctgctccagccacacaggtctcctccttgttcctctatcacaccaggcacagtcccgcctcagggccacaccctttaatgctcttcccccagatacccacatggctccctccctcacctcctgtaacttgtggcttagatgtcacttcagtgacagtgatgcctcccttggccaactggtttccatgcaacccctagtcagtctcccttactagaaggaggggtttttaatctgtgttgctcctggctgtggccttagtacctagaaagtgcctgagctacagtaagtgctctataaatgttggtggaataaagtgactaacaggccgggtatggtggctcacgcctataatcccagcactttgggaagccaaggtgggtggatcacttgagatcaagagttcaagagcagactggccaacatggtgaaaccccgcctctactaaaaatacaaaaattagccaggcgtggtggcaggtgcctgtagtctcatctactctactcaggaggctgaggcaggagaatcgcttgaacctaggaggcggaggttgcagtgagccgagatcgcgccactgcactccagcctgggcgacagagaaactccatctcaaaaatataataataataataataaagtgactaacagcagcagtgaagagtggggcttctggacgggcgcacaccatcagcgctcattaaatgcatgagtcagaatgcatgggccagccttatggaatggggccatcttcacctcgtttgcagaaagtttggagatggagacccaaaagggaagtgacttccccaaagtcccacagtgcgtggagggggcagccgatccctccacttcccctctgagtggctggagggatctttctggcacattctgtccagtcccctcgccagggcaaaacccttccccatcaccctcaggataaagtgccaactccccagcctggcatttgagccccgtcctggcccggctctggaaacctcccaggcctaatcgttctccaggtgtgtttattcccacctccctttgcgcctgtcgtcccctcttcctggaactacatcccctctctccccgatcagccccgacagggtgaccacagagttgggcgtgttggcgtcccccggcgcgcaggggcgtcacttcccgccccttcctcactgggaagtccctcccattgtctagcctcagtgccccctgatattcccacaatgcccccctgccatccggccgctcccagcccgcggccctggggcgcgatgctcgggaccctcagacgcgctcacctccgggaggccgcacttgcccttgtccgcgtacggcgacagccccgccgcgtaattcaccgacatcctcgactgccccacgggaacaataaagtttcccttgttgaggccgcttccgccggaagcggggcggggcggggaagaaggaggaaccgcgttccagtcctgcgcacccggcctcccacggcaaggcgcatgcgcctcttgctgacgccgcaggcgacatgttatctgctgtcagaaggaagcctgcctctttgcatgcaggtgtttgcggggcttgggaaggggctccccgatgacccgggcgggaaattggggcggccgcctacgtgagagttctccagtcacctctaaaatgcgggacacaggctatccatgtccccacaaccccttttacggattagtaaattccgtaaggacagagccggacagcagggaccccagcctaagggttttgaatgccacgcagagttacctgaatatctcatttgtgtgtgtgtgtgtgtgtgtgtgtgtgtgtgtgacggagcctcgctctgttgcccaggctggagtgcagtggcgcaatctcggttcactgcaacctccgcctcttgggttcaagcgattctcctgcctcagcctccctagtagctgggattacaggcgcccgccaccacacccagcaaatttttgtattttttagtagagacggggtttctccatgttggtcaggctggtcccgaactcctgacctcaggtgatctgaccgcctcggcctcccaaagtgctgggattacaggcgtgagccactgcgtccggccaagttatctgagtatcatccaactggaggttctgcattctgcaggacaggtcctgctcaaggtcaatggggctggtggcctggaggactcatttaagaatcatgtgttgagtacctactttgtactgggcacactggagagcaaaggtggtaccatctatgccctggtggctgcgggtggacacaaacatgtgaccaggtaatggtgacatggtgtggttggggtgcaatgggtgatgcagagggcacagggcagtgagggggctcacaggaggcacctgacccaggctgggggcatccgggagggcttcctggaggaggggatgttgcagcaaagatctaaaaagtgagtgagccgggcgcagtggctcacacctgtaatcccagcactttgggaggccaaggcaggtggatcacctgagattgggagttcgagaccaccctgaccaacatggagaaaccccgtctctactaaaaatacaaaattagctgggtgtggtggcctgtaatcgcagctgctcgggaggctgaggcaggagaattgcttgaacccaggaggcggagattgcggtgagccggagatcgcgccattgcactccagcctgggcaacaagcatgaaactccgtctcaaaaataaataaataaataaataaagagtgcatgagtcaggtagagccggttggggtgacatgaagtacagaaagaatgttcctggtggggggaacagcaagtgcaaaggctgagaaagaggaagagcatggctccttccagaaactgaaatcagtccagtgatgatagggaagatcgtgggtgtcttcccgccagagccagttggccaacaggcagtccgctgccagcctgtctcctccctcggctcatccccggccccctggggcggccgcctgctcagagccgatcaggtgtcagagtggagcggctggagctgctcgtggcccagctgggagtgggtaaccggagccggcagtgggcactgtggccgggagctcggggcactggagctgcaggaggtaggggaggaaggaggtgggagaggcccaggacggaggatccccttatggccccaggcccctgagcccttgtatgtgggagaaagaagccgtgctgagtcctagccaggctgcggagctacccaggtaccctgacacacacatgcactcgttcacccacgcacttcccacttgccggcctgtgccctgcctagcttcctccaaggcaggtgctcaacatcccacccggccatcaggcccttcttatttaccatcacctcttccagcaagcagcttcctaaatttagcaggcgtttctccctcccccaagcccacggattgtcttctcccaagcagcctgtgaactcctctgttgggtgtcttattaccccctgctttgggtgtgattgaatcctccagtcagaggtagaagaaaaaagggtaggtagtgagtgaatgggcaccggtggaggggtagatgaatggatgggtgggtggatggatggggggcgaataggtggattggtggtttggtagatgggtgaatgggtagatgtatggatggatgggtggatggatgaatgggtgggtgattgggcaaatggatggagggatggataagtggatggatggatggatggaaggatccatggatggactggtgggtgggtggatggatgcactggtgggtgggtgggtggatggatggattggtggttgggtgggtggatggagggatggataagtggatggatgagtggatgggtgggtgggtggatgggtggatgggtgtgtgattgggtgggcagatgggtggatggatggatgcttgggcagatggatggatgggtggttgggtggatggatgaagggatggataagtggatggatgggtggatgagtggatggatgaatggtgggagttggtaggtgtttgggtgggtggatggatgtgtgggtgaaatctgattaaagggtgatgaagaaccatgagaacatgaattgggtgggtgggtttgtgggtggtggccagtgggtggttatacagtgcttaggtgggaggatggatgtccaggtgagtgcataggtggtaaatgcgtggaagggtggcttggagaattcacgagtagataggtggacaggtagaggccatgccaacccctactccttggtaagaggcaaatacagattctccatcacagaaatccctttcacacatagggcctcacagtcacacccctcaaaaaacacaccccctcaagataggcctgcctgacctccgtgcctgcccatgcggaacgtagaacaggcccaggtggacagaagtgcacgtgtgcacacgccccacactcaacgtcacacacatgcatgcagccattgccccagacctccacccactatgggtgaattgctgtcacatggaggttccctctgactatgtagcaaacatgcctctgtgctgagagccgtcagccctggcttcagtccccagggagcccctgactgttgaaaaggacagaatcagcccagacccttccagcccatggagccaggggtgaggcagaggcagagacccagccagggtaggcgggaacccaatttggggagttagatctctgcttgggaacaagaggcaaagctgataagagcaagggattttggaactgggctttgaaggatgagtaggagttcagagaagaaaaaagaaaccattctaggcagaaataactgcacaggtaaaagttaggagaccagaaaaggcttgatctgtttggaccgcaggaaataccagtgagatgcatttatgaagcccctcatgtttggccaggctctgtgtagggaccatgctgaaaactgaccatgagttggtcaagaaaggatcatttctgtcactgtatagatgagggaagtaaaacagagagggcaagtaaactgccaaaggacacacagcaggtaggagatagagcaggtctgtgtcttgctctaggggccaggactggtcaggaaggaggaagcggtccttttgaggagggcgaggcaacggaccctgccgcccaccaggactggtgtccctcaccttacccccacccttgccctcctcaggtggcctgtggagaggagaaacacagggcaccaactatgaagactctcagggcgcgatttaagaagacagaggtgagtgtgaggccctagatgcccgatacacccctgcaacttcagccttctgtctcctggggcttggctgaagatccaccctttcattccagtacccacctcttctcctttcctctctgctgccccctagcgtcatgacctccccactgctccccgtacaagctttccagcccaggcctttacccaggccctagtccgctctccatggaattccttctcgccgcattgccaccaatcagaccctcctaattcctcacaatttggccccagtaccacctccccgtccaatctccgctctccccggccacagtaaccccttgcttttccaaggacccactttcccgaggatcctgatcttttgctttggtgtgtgtgtactcagcacatatttatatagcaggcgctgttccaggcacaggggaatcagccagggaatagggcaggcaaaaatccttgccctcgtggagccgaccgctgagtacgggagatgaacacgaaacaagataaataagtgacaatgtgtattttgtgtcgcaaagacagacaaagcaggaaaagggaattgaagcattcagggcaggggaggtggctgcagttttaaagagggtggccagggaaggcttcccagaggaggtggtattaaagcaaagattagaaagggaaggggagggctgggcgtggtggctcacacctgtaatcccagcattttgggaggccaaggcaggcagatcacgtgaggtcaggagttcaagacgagcctggccaacatggtgaaacgttgtctctactaaaaatacaaaaattagctgggcacggtggcgggcacctgtaatcccagctacttgggaggctgaggcaggagaattgcttgaacctgggaggtggaggttgcagtgagctgagattgtgccattgcactgcagcctgggcaacagagtgagactccatctcaaaaaagaaaaaaaaaagaaaaagggaaggggagtgggggagagagtttgcaggaattgcattccaagtggctggaacagccagtgcaaaggccctgaggtagatccagctgtcttctcttgcatccgtgtctttggctatgaactcctagaaagacatgcttcttcctccattgtccccattcttctcagccccctcaagtccctgtggcggccaattcagggcacagatggggaggatgaaagggagggctcacctccagggacaggcaatcagccttcctgagcacctctttgtgcctggcctgggtgggcaagcttgacttggagcctttagttttcgtatcatgggatacaacatccccatctggtgtggcctggagaaatcagggagtctgcctggaggaggtggcaccggagcagagcctggaagaatagggaggatttagagaagtgaaggcaggcacgtgaggagcggggcacggacctgtgtgggtaaagattcggaggctggaccaggtctgcttgatgcacaggcataacaggcagattctcttggcaggagcagagagtgcgagtgagtgggagctcaggatctttgaaagccatttttgaaaagccaaaaagagaggcctgtggaacaagcctggatttcattttttattttattttattttatttttgagatggagtttccctcttgtcgcccaggctggagtgccgtggcttgatctcggctcactgcaacctccacctcccgggttcaagtaattttcttgcctcagcctcccgagtagctgggattacaggcacgcaccaccatgcccagctaattttgtatttttagtagaggcaggacttcaccatgttggccaggccggtcttgaactcctgacctcaggtcatccacccgccttggcctcccaaaatgctgggattacaggcatgagccaccacgcttggtccatttttttttttttttttttttttgagacagagtctctttctgtcacccaggctggagtgcagtggtgctatctcaaccgactacagcctccaactcctgggctcaaacgatcctcctgcctcagcctcccaaagtgcagagactataggcgtgcaccaccacactgggctaatttttattttttgtacagatggggtgtagctgtgttgcccaggctggtcttaaactcctggcctcaagcgatcctcctaactcccacccagagtgatgggattacaggcgtgagccactgcgcccagccaagcctgggatagaatcaggtggctctgagttcaaatccttcctctgtccctggtgtcctgggtgactctggggatgtcatgccccctctgtggcttccttcagttgtttgggctcatttgatttgatttgatttcatttatttttgagacagagtctcactctgttgctgaggctggaatgcagtggcacgatctctgctcactgcaacctctgcctcctgagttcaagcaattctcctgcctcagccttccaaatagctgggactacaggcgcctgccactatggctggctaaatattttgtatttttagtagagacagggtttcactatgttggtcaggctggtctcgagcttccgacctcaggtgatttgcccgcctcagcctcccaaagtgctggaattacaggcgtgagccactgcactccgcccattttattttgtttttaaactatttattaattatcatgtacccattcatttcattattcatttttattttatttaaaacattttaatttaatatcattggattcactttattttttttaatttttctttcttcttttttttttttttttttttttgaaggagtctcactctgttgctcaggctggagtgcagtgttgtgatcttggctcactgcaagctccacttcctggattcaagctattcttttcttatgccgcagcctcccaagtaggtgggactacaggcacgcactaccacgcccagcaattttttttgtatttttagtagagatgggtttcaccatgttggccaggctggtctcaaactcctgacttcaagtgatccacccaccttggccttccaaagggttgccattataggcatgagccaccatgcccggccctaagtttttttttttaagagatggggtctcactatgttgtccaggctggtctcaaactcctgggctcaagagatcctcccgcttcagccaagtagctgggactacagatgtgcagtactgtgcccggcttatttattttcatttttgttgatttttgagcactataaaaaatataagatgtgctttgcaggtgtcagctcatttaatcctcaccaccgtgttatgaggcaggagcttttattatcttcattttatagatgagggagggaagcccagagaggttaagacacctgctcaaggtcacacagctaggaagtgagacacaagccttcccccagggctgcgttactatgaacatgattggcctggaggtgggaggggagtgcattgattgaaaagagaatgggtggagacagacagcgggagagaaagaggtgaaaaacggtccattaactgcctacaaaatgtggcattgggtgagcttcattcactgtggagtgatcctaaaatttttcttcccacgtggactcaattcctcgatgatagttgacccttgaacaattacagcccaccctcctgcacagtcaaaaatccatgtataggctgggcgtggtggctcacatctgtaatcccagcactttggaaggccgaggtgggtgggtcacgaggtcaggagatcgaggccatcctcattaacacggtgaaaccccgtctctactaaaaatacaaaaaatcagccgggcgtggtggcgggcgcctgtagtcccagctactcgggaggctgaggcatgaacctgggaggtggagcttgcagtgagccgagatggagccattgcactccagcctgggcaacagagcgagactccgtctcgaaaaaaaaaaaaaaatctggctcggcatggtggctcacgtctgtaatcccagcactttgagaggcagaggcgggcagatcacctgaggtcaggagttcgagaccagcctggccaacatggtgaaaccccctctctactaaaaatgcaaaaattagccaggcagccgggcatggtggtgggcacctgtaatcccagctactcaggaggctgaggaaggaaaatctcttgaacccaggaggcagaagttgcagtgagccgagatcacgccattgcacgattgcccagcctgggtgacagagcgagactccgtctcaaaaaacgaacaaaaaaatccatgtgtaagtggacctgggcattcaaacccatatttttcaggggtcaactcctgaatgctttttttccccaagcattcctcagaagtagtagccactggtaaaccaagccatatgattgcttaatttccaaagcatagttatatttaatatttaagtaaatctttcaagaagtgtgggtggctaaaaaagagatacctcattcgggatgtgggtgtgttttgatatgtttgcaatgggaggggtcgggacaaagtcaaaattggatggggacaggataggtgttaaaacctcagacgggtgtgagggcctctgagagtgtctggagctggaggggcctgaggttagcccatagcctgggctggaactgttgcagcagatgggaggcctggctgttgctgggaagctgcagggcctccatcctcccctcccagagcaccttgccatccatccctccacctgcccttctccagtttcgcagcaggcagccggagtcaagttcagcttttgttcagcagccccgagggaagaaagcaaacacccatgactgcaggggccaggcccccccctcctgtcactgggaccttgtgttccgtgtcttctagccactgctacccctctcctcctctccttagggcactctccggcctttcctggtccctaacaccggctttttcttatttatgtatttacttttattttattttctttcttttatttttatttatttatttatttatttttgggacagagtctcgctgtgttgccaggctggagtgcaatggcatgatctcggctcactgcaagctccgcctcccgggttcaagagattatcctctctcagcctcccgtgtagctgggattacaggtgcacgccaccacacctggctaatttttgtgtttttagtagagacggggtttcatcatgttggccaggttggtctcgaactcctgacctcagatgatccgcctgcctcagcctcccaaagtgctgggattacagacgtgaaccaccgtccccagcctatttatttatttattttgagacagagtcttgctctgttgcccaggctggagtgcagtggtgtgatcttggctcactgcaacctccgcctcccgggttcaagggattctcctgcctcagcctcccgagtagctgagattacaggtgcctatcaccacgtctagctaattttttttttttggtatttttaatagagatgggttttgccatgttggccaggctggtctcaaactactgacctccaatgagccatccgcctcagcctcccaaagtgctgggattacaggcgagagccactgtgcccaaccaacaccgtttctttctttggggtcccaacagttggcattgcttactctgatcccccttgggctgtccgtgggcctcagtgtttccatccataaaatgggagttacctggagctgttcacttggggcttcactgacctcctgcctttactttaggtttcaggaaaatctcccaagtgggaagattggggtttctagagagtcacagactccatacatcaatgcttcctggaaagtcctctttctctttctgtcttttttctttttatatttttattttttacttaagtatgcattttttttttttcagaggtgaggtcttaccacgttgcccaggctggtcttgaactcctggcctcaagcgatcctcccgccttagcctcccaaagtgctgggattacaggcgtgagccaccgcgcccggccaggcctcgtattttcatttttcaccgagccctgcaaaacctatagctggtcctgcatggaatacagcagtgactaagatagacaaaaatcactgcccctgaggaggtgacattctaagggagagatcaagaggaaacaagctgggcgcagtggctcacgcctgtaatcccagcactttaggagatcaagatgggaggatcacttaagcccaggagtttgagaccagcctgggcaacatagcaagaccccatctcttcaaaaaaaattcaaaaattagttgggtatggtggtgtgtgcctgtggtctccagttactcaggaggctgagatgggaggaccacttgagcccaggaggtcgaggctacagtgaatgatgattgtaccactgcactccagcctgggtgacagagcaagaccctgtcccaaaataaataaataaataaaaataaaaaatgagagtaaacagaatatttttaaaaaggtatgtagtatcttaggtggtgataagaggcctggcgcagtgactcacgcctgtaatcccagcactttgggaggccgaggtgagtggatcacttgaagtcaggaattcgagaccagcctggccaacacagcaaaaccccgtatctactaaaaaatacaaaaattagccaggcgtggtggtgggcacctgtaatcccagctactcaggagtctgaggcaggagaatcgcttgaatccgggaggcaggggttgcagtgagccgagatccctccactgcactccagtctgggcaatagagcgactccatcaaaaaaaaaaaaaaaaaagacaacaatgaaggaaaaatatagctaaagaaagggctgtcagagaagggctcttggaagaggcatctccaagagtggacagcagtaaagaaagcagccatgtgcacggtggggcaggtgctccaggcagaaggagctgcactggccaaggcttggaggtgggacccagctgtttgaaggacaagaaggaggctactatggcagcatggattacaccgagggaaatgtaaatggagatgatggcaggcgcggtggctcatgcctgtaatcccagcactttgggaggctgaggcgagcagatcacctgagatcaggagttcaagaccagcctgtcaacatggtgataccccgtctctactaaaaatacaaaaattagccaggcatggtggcgggtgcgtgtaatcccagatactcgggagactgaggcatgagaatcacttgaagccgggaggtggagtttgcagtgagcagagatcatgccactgtactccagcctgggcgacagagcgagactccgtcgggagggagggaggaaggaaggaaggaaggaaggaaggaaggaaggaaggaaggaaggaaaaactccatgaggtcaggggtcaggcactggcagagtggggctgctcagagaagggttagcaaattttttcttaaaaggccagaggattaatatttttggtttgtggtgcagaccagcctcagctctgccattgcagcctgagaatagcctttgactgtctacacttttttcttcatatcctgcatgtggcatccaacgatctacaaatgaatgggcagggcttggccccgaaaaaactttatttatggacactgaaatgtgaattgttttgttttgttttgttccgagatggagtctggctctgtcacccaggctggagtgctctcaggttactgcaacctcagcctcccactttcaagcgattctcctgcctcagactcccgagcagctgggattacaggcgtgcaccaccgtgcccagctaatttttgtattgttagtagagacggggtttcaccatgttggccaggctggtcttgaactcctgacttcaggcgatcagcccaccttggcctcccaaagtgctgagattgtaggcgtgaaccaccgcacctagccagaaatgtgaatttcatatcatttttcacgtgtcaggaaggatgattcttattttgcttttctctcccccctccaacgactcacacgtgtaaataccattctctacggaaacaggcagtgggcaggatctgggctgctgtgagcagtttgcattttaagctgagtgaggtctctggaggcttttgtgcaggagagatgagatctgatgcaggtttaggaagctgcctctggctgctgggggagaagggacaaggggacaaggtcagaggctgaagaagaaagatgcatcccagaggcagaacctgcagtgatggggctagactatggtggtggccgtggaaggggtgagaaggggcagaacaggacacagtgtgcagccagtgggcttggccggtggaccgagtgtggggcaagagagaggtgtcacggtgatgccagggcttggatgaagcctggagggctgacagtatccatggtacacacctcagtgggctccgaggggcatttgctctgattgattgattgatttttttcagatggagtctcgctgtgtctcccaggctggagtgcagtggtgcgatctcggcgtgagccaccgcgcccaggtttttgtttgtttgtttgtttgtttgtttttagagagggagtctcactctgtcacccaggttggagtgcagtggcacgacttctgctcactgcaagctccgcctcccgggtgcacgccattctcctgcctcagtctcccgagtagctgggactacaggcgcccaccaccacgcccggctaattttttgtatttttagtagagacggggttttgccacgttggtcaggctggtctcgaactccccatctcaggtgatctgcctgcctcagcctcccaaagtgctgggatgacaggcgtgagccaccatgcctggccatttgctctgatcttgtatggcatccaggaggacaagtgtaggagacagttggaaactgaagccctgagctgggagatccgtttcggtctcttctctggagaagctcagaggacctccccacccccaagggtggaaggagagaagagttccaaggacaccctccttcccaaatgcctgtcactttccattttcctgccttggttcccactcctccctcctcttgtccaaacatgtctaagagggccgggcgcagtggctcacgcctgtaatcccaacactttgagaggccaaggcaggtggatcacgaggtcagagttcaagaccagcctggccaacatgacaaaaccccgtctctactaaaatacaaaaattcgctaggcgtggtggcgtgtgcctgtaatcccagctactcgggaagctgaagcaggagaattgcttgaacccgggaggcagagcttgcagtgagccgagatcgcaccactgcactccagcctgggtggaagagcaagactccgtctcaaaagaaaaaaagtaaaagtctaagaataatcacggaccacaccgacgtgtaaatgctcaatgctcacccagccctaagccagtggtcaatgtgtcaatggagggacacttgccagtgttgggatatctgtggttgtcacaacttggagtgctcctggtgtggagtgggtggaggccagggatgctgctcggcaccctgcagtgcccaggacagccccattctagagaaagatccagcctcaaatgcccacagtgcttccttggtgcctgtcctattatctatctcatttaaccgttgagaaattgagagggagaatttcagagagggaaagcgattagctcaaggtcacacagcaaggatgatataaccaaacggaattcaagcccctgtcacctgtctgctgcgtcgttgctcttaaattctggctctggaagacctcggttttgttgttgttgttgttgttttagtttgtttgtttttgttgttgtttatttgttttgcagtggagtctcgctctgtcacccaggctggagtgcagtgacgcgatctcggcttactgcaacctctgcctccagggttcaagcgattctcctgcctcacttcctgagtagctgagattacaggcgcccgctaccacacctggctaatttttgcatttttagtagagacgaagtttcactatgttggccaagctgttctcgaactcctgacctcaggtgatctgcccgcctcggcctcccaaagttttgggattacaggcgtgagccaccgcgcctggcctccagggctccttctaaaatgccaattacctgcaagggtcttggctgtgccccagagtctccaggcctgcgaatgctgcgtggcatccagtgggcgctcaataaatgcttactgcttgaaggagcatctcccccaagtgttcatctgatgcatgtttgtggagcacctgccatgggccaggcactggggacgctacagtgacagaaaggaacccaaggcccctcctctaccggaggagccgtgggtcccaggagtggcggaaattgaccggaaatggctagagaatgtcagagctgcgccgggaccagctagctctttctgtgaggaacgagtcacagttttatggtgcgcttactgtatgctaggcactggtcgactgagtgctgccaggtagtaccttggcatcctcccggtaaccctccgcagtaggaactatttattatgaaacccattttacggaggaggaaggagaagtccaaaataggtaagtctgttggccctgtcatataggtaggaaaggctggggcaggggcggggtgctggattcaaattcaggtgtgtaggattgcagctccccagtggcgaatgaatgaatgaatgaacgaatgactgattgaatgaatgaatggatgaggcaatgagtgaatgaatgaacgaatgggcgtgccaatgaatgagcaaatgagtgtgggaatgaatgaatgaatgaatggtgcgggaatgaacaaatgaatgaatgggtggtgaacaaatgaatgggtgagtgaactaatgaatggatgaatgggtgagccaacaaatggatgaacaaatgagtgagttaatgaatgcaggaatgagtgaatgcaggaaggaatggtgtgggaatgaataagtgaatgggtcatataagaatgaatgaatgaacaaatgggtgagaccaatgaatgaatgaaagagtgagcaaataaatgggtgaacgaatgaacgagtaaatgaacgaatgaatgaatgaatgaatgggtgagcccgtgaatgggtgaacaaatgaatgagtgaatgaatgaaagggtgagcgaataaacaaatgggtgaaggaatgaacgagtgaatgaacgaatgaacaagcgaatgaatgaataagtgaatgaacgaatgggtgagtgaattaatgcatgaaagggtgagcgaataaacaaatgagtgaaggaatgaacgagtgggtgaacgaatgaacgagtgagtgaatgaatgaacgagtgaatgaacgaatgggtgagtgaacgaatgaatgaatgggcgggccggtgaatgaatgaacgaatgggcgaacgaatgaatgagtgaatgaatgaaagtgtgagtggcgagagccctgccggccgcgtggaggtgcgaggctgcggacgtcgcgggcccggaggcacctgcgcgcccttggccgactcggaggaggtggagatggacgcccgcgggtcccctggagatgcagccggcggcctgcgctggtgagggagccgggcccccggcgccgcgtcctcctcatcctccaggcgacaaggtcaggaggggccggggcggcgccccttccctcagcccccagcccccagccccctacctgggtcttcccattccatcccgtgggggagggggctggcgaggagggcaagggggagggggcggcaccagggagggcgggaccgggcgggcgggcggggcggggagctccggcagcgcccagccccgccctccggccgctccccgcggtccctccagaccctctggccgccgcctcctcttggaaccccgtgcgccccccgcgccccgcgccccggacgccatgaagcagctgtgtctgtgcgcagccgcctccttcgcggtagggcccggggagggggcgcaggagcgggcggggcgcgggtacctcctctcccctcccttccccgtccccggctgacctggaccacccccccattccagacccgggaaagatggtcggcggcggggggtgggggggaacagaggttggggcagcttttgggggaatggaagagacatttggggagacatgtggacacgttttggaagactctttgaaacaaatggggacatttaggaacatttagagggcattggggggtgcagttttgggaaaacattttggagacagatggggtcattgaggggacaacttggaagctattttgggagagccgattttgcgaagaggtaatgatttggagaacagtttgggagaacatttgagggatgtttttggaggatatttttgggacatgacggtatcattgggaaggatggttttacagaacacttcaggaatttgggggagacatttcgtaatgcatttcaggctatagtgttgaggggagaagcctcgggatgtttaggggacagtggtggcatttcagggcagttgtggataaacagggcagaggatggtcctgagaggcatttaaaggggacttttaggggttcagatgggactttggagggtagtttggaaaagactcatggatccatttgctgggggcgatgttgcaggggtggctttcactaagggatgaattgggggacaactttttttattgtacagagtgggtcttgctgtgttgcctaggctggtctcaaaattcctgggctcaaatgatcctcccacctcagcctcccaagcagctacaggcatgagccaccatgccccgctgatgatttttattttttgtagagacggggtcctactatggtgcccaggtttgtctcaaactcctaggctcaagcgatcctcccaccttggcctccccagatgctgggactacaggcgtgagcctccatgctcagcccaggggacaacgttttggaaatagatgccagggggctgctcaggggatgatgctggtggtgggcttttgttggacaactggggtgatgggcctgggggcagatgctgggggtcgcaggcttgggggacactgtctgaggaccccctcgcccaggaccacctccccctgcagctgcggctcagccccactgaccttggctcctgcccgccctgcggcccctgccccatcccgaagccggcagccagaggcaggcgccaggcaagtgcccaggggcaggtggtgagagcccggagcccctgtcgggggcgtggggaggggacagcagccaacactgccccacgcacttctgggcgtgccctgcagagtcaagactggggcaagagtgacgagaggctgctacaagccgtggaaaacaacgatgcacctcgggtggccgccctcatcgcccgcaaggggctggtgcccacgaagctagaccccgagggcaagtccgcgtgagtgcccgcgacccgggagtgagatggctgaggggtggcaaccttgcggctgaacccttgtctctcacctccaggttccacctggcggccatgcggggtgcggccagctgtctggaggtgatgatagctcatggcagcaatgtcatgagcgcggacggggcaggtactgccagctgggccccggggagggaggaggaactaagcccaggtgcccagcctgagggtccagccagaccctgctcccaggtctcaatgttccccgctgaaaaaaggggaggctccctctggtgctcctcccctgcccccagggagacacacaggggcatgttaggatggggtggccaaagatagagactgtggctggcaccgagcaaagccagtggacagcttgtggatggggagtgactaggattcaggtattggttcagttggatggggaagtagctggcatggggaagtagctggggcttgggggatagctgcaaagtttctggggttttgttgttttgtttttcttttttggggggagggacagggtctccctctgtcacccaggcttgagtgcagtggccatgatctcagctcactgcagtctccatttcctgggctcaagggatcccctccaacctcagcctcccaagtagctaggactataggcgcacaccaccatgcccagttaatttttctattcttagtagggatggggtctccctgtgttgcccaggccggtcttgaactcctgggctctaagtgatccttccacctcagactcccaaagtgctgagattataggtgtgagccaccatgccaagcctggggaagtttctagaaagtgactgaggcagaggaagaactggggcttgggagataactgggaccattggacgaactaagctttgaggtgcatctgggatataggagtatccgagataaaggaagtgactgaagggaactgcttggagtttggaggaggaactggattcatgggagtagctgagcttgcaaagtatctggggcaagagaataacaagtagagtttggggatatctgaggtatatgggatagctgggatctaggagtagctggagctgtgggagtagcttgagctcttggagtagctgggttacgaggagaacttgtatgtatgtatgacttaactggagacctggggggaataactgagataaaaatgtgtggccaaaaggagtagttggggctcaggaggcaactaggcatggggacacagtcaaatctgaagctttagggtcacaggcatggtgggcagggaatatggaatagctggggattcatggagcatcagacagggacagagttggcatttggaagaggaagggtatatggattggcaagaacatatacagcaactgtgggttgtgaagggcagagctgaaactttggtgtagtggaccctgtagagtatctggggacatggggagtagctgaggcaatagggcttgaggaataggtgggtgtggacagtcgctgagatgggattgtctggaatacagactagccatggcttagagagtctctgggtacagggaatagcatggttttgagaagtacctgatggccgggcaccatggctcatgtctgttaattccagcactttgggaggctgaggtgggaggatcgcacgagccaaggagttcaagacgagcttgggcaacatagcaagactcctgtctctacagaaaatacaaataaattagccagacatggtggcacttgcttgtagtcccagctactcggaaggctgagacaggaggatcgcttgagcctaggtgttcaagcctacagtgagctatgatcacactgcactctagcctgggccacagagcaagatcctttctgcagggaaaaaaggagagaaatactagggtttacggactttgctagactcagaaactcatcacaagtagttgacatggcttggggagcagctgggagctacttgaatagctggagctccagtaaatcttctttccttccccaggttacaatgccctccacctggccgccaaatacgggcacccacagtgcttgaagcaactactgcaggtcatttactgtcttatctcagctactcccttggcccctactactcctgagttccagcaattccttgaacccccagatgctctatgaatcctagatattccttggccccttttactccagaaccctagctactccctggataaccaggtactctcagaccatccacatgcttctcctatttaagatgtactcccaagccaggcgcggtggctcacgcctgtaatcccagcactttgggaggctgaggtcggtgaaatcgcctgaggtcaggagttcgagaccagcctggccaacacagtgaaaccccgtctctactaaaaatacaaaaaattagctgggagcggtggtgtgtgcctgtaatctcagctactagggaggctgaggcaggagaatcccttgaacttgggaggcggaggttgcagtgagccgagatcatgccattgcactccagcctgggcaacaagagcgaaacaccatctaaaatatatatatatactcccaatgccaggtatttcctgagctctgtttctccccaagccctgggtccttccttagccccagacactcccagagttcccagccactcctcaaattctcagctgcttctcagctctcagctattttcttttctcaccaattttcatgaaaatggagtcccttgggggccacggaagggtgaggctgaagtatagcagagcccagggtagggaaggcagtcctagagaaatcaggcagcaagaaggatggctccgcctcaaaggactcgccccatccccaggcttcctgcgtggtggacgtcgtggacagcagcgggtggactgccctacaccatgcaggtgggtgcagcccagccctgccctgaccccgaagcccagagggtgctagacttgggggttattctgcccagggccctagggacctgacctgctgtgaagcttcctgtctcctcctttctttctttctttttttttttttgagacggagtctcactctgttgcccaggctggagtgcagtggcaagatctcagctcactgtaacatccatctcccaggttcaagcaattttcctgcctcagcctcccgagtagctgggactagaggcacctgccaccacacctggctgatgttttgtatttttagtaaagacggggtttcaccatggtggccaggatggtctcgaactcctgacctcaggtgatccacccgccttggcctcccaaagtgctgggattacaggcgtgagccaccgctcctggccttccttttctttttatgagatagggtcttgctctgttgcccaggctgaagtacagtggggcaatcatggctcactgcatccttgacctcccgggttcaaacgatcctcctgcctcagactcccaagtagctgggaccacaggcgtgcaccaccatgcctggctaatattttaaatttatttgtagatacaggatcttgctatgttgcccaggctgatctcaaactcctgggctcaaatgatcctcccacctcggccactcaaagtgctggaattacaggcgtgagccacctcacctagcctcctcctttttttcttgacatagaatctccctctgtcgcccagggtggagtgcaatggcgcaatcttggctcactgcaacctccacctcccaggttcaagcaattctcctgccttagcctcctgagtagctgggactacagacctatgccacaacacccacctaaaatttttttgtatttttagtagagatggggtttcaccatgttggccaggctcatctcgaactcctgacctcaggtgatctgcccgcctcggcctcccaaagtgctgggattacaggcgtgagccaccgtgccggcccttctcccttttttttttttttttttttttttgaggtggagtctcgctctgtcacccaggctggagtgcagtggcgtgatctcggctcactgcaagctccgcctcccgggtccacgccattctcctgcctcagcctcccgagtagcggggactacaggcgcctgccaccatgcccggctaatttttttgtattttttagtagagacggggtttcactgtgttagccaggatggtcttgatctcctgacctcgtgatccgcctgctcggcctcccaaagtgctgggattacaggcgtgagccaccgtgccggcccttctccttttttattacctactgtgtgccaggcactggagcccatcataaatcccggttaccctttgaaccacaggctattagcccattgcacagatgaggcttgatgaggcttaatgaggctgtcacttgtccgcagcaggtaaatcgtagggaatccaggtcgtctgacctcaaggagcagtcgaatgtactcctgggctttgtgaggatgaggagaggtccctagggtttaatttcctttgtggagcccctaggagataccaggaaaaccatagctccaggcagctggtaccctcataatcacctaatccaaactccttcccagagggagggaaagggacccaccgacttgaaccagaactcagcccccgacctgtccgctgtccccgtgaaattcaggcatggctttcgctgacgactcaagaaacatctgttctttcggaaactcagaataaaatagggctttgggggttttagtcactgggtgagaattctctgcagttggagtatgctgccacctagtggcggcaatgcttctggtcacaatataggagtccgttggtttttgtcactcaacagttaactgagcactctgggaggcccaggcgggcagattagcagaggtcaggagttcgagaatagcctggccaacatggtgaaaccctgtctctactaataataaaaaattaaggccgggtgcagtggctcacgcctataatcccagcactttgggagcctgaggcgggcggatcatgaggtcaggagatcaagaccatcctggccaacacggtgaaaccctgtctctactaaacaatgcaaaaaattagccaggcatggaggcatgtgcctgtaatcccagctactcgggaggctgaggcaggagaattgcttaaacccggggagtggaggttgcatagagccgagatcatgcccctgcacagcccgggcaacagagcgagaccccatctcaaaaaaaccaaccaaccaacaacaacaacaaacagttattgagtacctactgtgtgtcaggcaccgttctacgtgttgtagataaggtttgcagcaatcaaaacctcatactgcctcagacatacagcaggtattcaaacagagtttgttgactgaaaaatggatttttgtgcttaatcagactggatgtcaacctgctggaattcatacccagggattccagagaccatgcccttgtgtcagctgcacagcctcctggggagcctccctgtttccactctggtcctgggcaaatggcagtaggagggatctcttaaaatataaatagacaggccaggcacagtggtgcacgcctgtaatcctagcactatgggagtcagaggtgggaggattgcttgagcccaggagtttgagaccagcctgggcaacatggcaaaaccccatctctactaaaaatataaaaattagccaggcgtgatggctcatgcctataatcccagctactcgggaggctgaggcaggagaatcgctggaaccggggaggcggaggttgcagtgagccaagatcacacccctgcactccagcgtgggtgcagagggagactccatctcaaaaaataaaaataggtcgggtgcggtggctcacgcctgtaatcccagcactttgggaggccgaggcgggtggatcacgagctcaggcaatcgagaccatcctggctaacacggtgaaaccccgtctctactaaaaatacaaaaaattagccgggtgtggtggcgggcgcctgtagtcccagctactcgggaggctgaggcaggagaatggcatgaacccgggaggtggaggttgcagtgagccgagatcgggccactgcactccagcctgggtgaccagagcaagactccgtctcaaaaataaataaataaataaataaataaataaataaataaaattaaataaatacataaacacataaacggggccgggcatggtggctgcagcctataatcccagcactttgggagccagaggcaggaggattgcttgaacctaggagtttgagaccagcctgggcaatatagtgacattccatttccataaaaaattaaaaaaaagaattagccaggagtggtggtgcacgcctacagtcccggcggcagattgcttgagcccaggagttcaagaaaagcctgggcaacgtagcaagaccctgtctctaaaaaaataaaataatataatataaaataaaataaaaattagccaggcacggttgcacatgccttgtagtgtgggtctcattcctgtaatcccagccccttgggaggccgaggcaggaggatcacttgagcccaggagttcgggaccagtctgggcaacacagcgagaccccgtctctacaaaaagtatagggaaccacagtgcttgggactggcagtcggcagacctagatcctagatctgactctgcctcttaccccagtgggtgaccactggcctggttgggcctcagttgctgcatctgtaaaatgcaaaacttgcctttgttacaaattcctcagggcacatgggaatttctcatgaaataaaggagcagggtcacacccaggcagaaagtgcccagaaaatgtcgaagtctcaccctacccctactcttcccccttttgtttgtcttcctttcttttcttggtttttgagacaagatctcactctgtcacccaggctggtttgcagtggtgccatcatggttcactgcagccttgaactcctgagctcaagcggtcctcccgcttcagctggggactccctagtagctggggccacagacacacaccaccacacccagataatgtttgcttttttttttttttttttgtagagacagggtctcactgtgttggcccaggttggtctcaaactccagaactcaagcgaacctcctgccttggcctcccaaggtgctgggattacagggttgagctaccgcaccggacaaccttttctcttttgcagcggctggtggctgtctctcctgctcagaggtgctctgctcctttaaggcacatctaaacccccaagatcgggtaagcttctgggatctcttcagggaagatgttatgcttgaggtatgctgccaccaagtggcagtatctcaggcaccctttgaaagtctgagaaagtttgaggtgaaactcaagggcagttatataggcttctgcacctcccgggggtcagtttctcatgccatcgcatccctcctcctccctaccagtcaggcgcaacacccctcattatagcagctcagatgtgtcacacagacctgtgccgtctcctactgcagcaaggggctgccgcgaacgatcaggacctgcaaggcaggtgagcatctcccctcccagccagtccaccctatgctgtgtgaccttcggcaagacttaacctaagtaagacgatctagccagcctcctcttcccagcctggcctgggtgctgaggtgggcatgggggcttgggggatgttctcatctcctcagtagccccctcccctggtaggacggccctgatgctggcctgtgagggggccagccccgaaacagtggaggtcctgctgcagggcggagcccagccgggcatcaccgatgcgctggggcaggacgcggctcactatggcgccctggcgggggacaaactcatcctgcaccttctgcaagaggcggcccagcgcccctccccacccagcggtatgcaagccccacctccccaatgcatttgcttcttggcagcttcttgtcactccccttctctttatcgtgaatagtttcaaggtacccccgattggctgcattctaggaggtcctagagcttacccaattctactcagaacagtttcaaggagccccagggcatttagagtagtctgggagggggtctgcttctgctttcctgggtcatctgtacagtaagaactttgcctgtcctaagaagggcaccccctgctgggcaaggtggctcatgcctgtaatcccagcactttgggaggccgaggtgggcgaatcacttgaggtcaggggttcaagaccagcttgaccaacatggtgaaaccctgtctccactaaaaatacaaaaattagctagacgtggttcaagcaattctcctgcctcaccttccagagtagctggaactccaggtgcctgccgcctaagtccctcacgcctggctaatttttgtatttttagtggagtcggggtttcgccacgttggccaggctggtctcaaactcctgaactcaggtgattcacccgccttggcctcccagaatgctaggattacaggcatgagtcaccccatccagcctatcctctctttttaacagtcccaagtccctctctcagcactctacccaagcgccagatttctaccttaaacgccctgattcttggggaaatcgggagccccctacaagtccctggggcccaccaatgcccttcctgggcctgggaacagaatgcctgaccctgcttccctctctccccagccctcacagaggatgattcaggcgaggcgtcatctcaggtatggacccctaagcagtgaaggagcccctcctccctgcatccacactaacttctcccctgccccaagctctgtgagaagagaaggaagttagacctgggaaaacctgtttggaaagaatgctaccttcagggtatgctgccaccaagtggcggcagtgtgctcagcctaactcccagaactgggtgagaatactggatggggccaaattatggggctggggtgggagggcagtggggactgaggttgttgagggttggtgtcttcggggaaggaagcagatctggcctcttcccctctttcagtttttttgtgttttttttccccgaggtggagtctcactctgtcgcccaggctggagtacagtggctcgatcttggctcactgcaaccttcaccccctgggttcaagcgattctcctgcctcagcctccctagtagctgggattacaggcacccaccacaactggctaatttttgtatttttagtagagatggggtttcaccctgttggccaggctggtctcaaactcctggcctcaagtgacccacccgcctcggcctcccaaagtgctgggattacaggcatgagccactgagcgcgacccctctcctagttttttttttttgttgttgttgttgtttgtttgttttgtttattttttgagagatggagtctcgccctgtcacccaggctggagtgcaatggcgtgatcttggctcactgcaacctctgcctcccaggttcaagtgattctcctgcctcagtttccctagtagctgggactacaggcgtgcgccaccatgcccagctaattttttgtatttttagtagggtcggggtttcactctgtgttgtccaggctgctctcgaactcctgacctcaagtgatcacccaccttggcctcccaaagtgctgggattacaggtgtgagccaccgcgctggcccctctcccagttttaaagcatctctgttccacagaggagtgaaaacgtgtgggcaatgtggtctagctggggaaagaactgagagacagagaggagcagagagtaaagagtaagatctggaacttacagggagttggtcttgtctgcgctttgctgggataagtaagcggcaggaggcaggggctgctggttccatgttctcaggaagtcaggccatggctggggctggctgggttggtttactgtgggggaggctggcatggccccccgatcggcccccttcactctctctcccctcccttcccagaactctatgtccagccatggaaagcagggggcccccaagaagcggaaggcgcctccacctcccgccagcattcccatgccggtgagagatgctctgggcacgggaggaggcatggggagcccccaggcacggggaggggctctggctgagacctgggatggggcaaccttaggccccatctaaaggccgtggtggggaggggaacaggatgatcgagatgcctatgaggagatcgtgaggctgcggcaggagaggggccgcctcctgcagaagatccggggcctggaacagcacaaggaacggaggcagcaggaggttaggaggcctcggagatttgggcgtgggccagcctgggtggggtcaatgcaggcatgaagatccccctacttttctcccaccttccctcctccatctctctccctccccaccctgctgcagccacctgggcctcctcgctgttcctccaactcgccaggcgcagtcctgcctcagggcctttgcaccaccagtgtcctctgcctggaatgctctagcgcagtcctgcctcagggcctttgcaccacctgtgtcctctgcctggaatgctctagccccagatggccccacagctctttacctcacctactttatgcagtaggctcctcgccaaagacacttcccatgcccacttcccatgcccacttcccatgcccactttcttcaaaattgtaacatcaccccccaccacccccccggccaactcgctagttcactttattttttttttatttatttttggttttgttttgtttttgagacggagtctcgctcttgttgcccaggctagaatgcaatggtacgatctcggcttattgccacctccgcctcccgggttcaagcgattctcctgcctcagtctcccaagcagctgggattacaggcgcccaccaccacatccagctagttttgtatttttagtagagacggggtttcagcacattggccaggctggtctctaactcctgacctcaggtgatcctcccgccgcggcctcctaaagtgctgggattgcaggtgtgagccaccgcacccggcctctttatctccatttgcatcacttgctgctattgggcatgcatctgttttatgtgtgtccacccatttgactgtgagcctgcgagggcaggcatggctgatggtgcctgggtcacagtatgggcgtcgtcaatattgattgggtgagtgaatattcaagtgagtgtatgaatgaatggccaaaaccaggtctgccccataagaggcacccagtaaaaactttctggctgggcacggtggctcacacctgtaatcccagcactttgggaggttgaggtgggcagatcacttgaggtcaggagttcgagaccagcctggccaacatagtgaaaccctgtctctactaaaaatacaaaaaaaaaattagctgggcatggtggcaggggcctgtaattccagctacttgggaggctgaggcaggagaattgcttgaacccgggaggcagaggttgcagtgagccaagatcacaccactgcactccagcctgggtgacagagcaagactccatctcaacaacaacaaccacaacaacaacaaacaaaaacaatcttgttgagtgaatgagtggatggaacggtgcctggcatacagcaggtgcttaataagtacatagtaattgtccagaatggtgcatactggcacacacagcaggcacttaataaatacttagaaatgaatgactggtcagaatggtgcatgctggcacacagtaggtgctcaataaatactgagtgacaggtcagaacaatagctggcacaaagtaggcacctaataaataggaatgaggccgggcgcggtggctcatgcctgtaatcccagcattttgggaggctgagacaggcggatcacgaggtcagcagatcgagaccatcctggctaacaccgtgaaaccccgtctctactaaaaatacaaaaaattagccgggcctgttggcgggcgcctgtagtcccagctacttaggaggctgaggcaggaggatggcgtgagcccaagagacgcagcttgcagtgagccgagatcacaccactgcactccagcctgggggacagagtgagattccatctcaaaaaaaaagataaataaataaataaataggaatgaatgaggctcaacatacagcaggtgctcaataaatatttagtaatgagtgagcaggcagaatggtgcctggtacacagcaggcactcaatagtaatgagtgagcgggcagaattcagtaggtgctgaatagttgcacgtggaatgcgtgaatgtgcatggaatggaggctatgaagcaggaggtggggcagggaggcctcttgcccagatccaaacccctgtccctgtttctcccgtcagtccccggaggccagctccctgcacatcctggagagacaggtaggtgggaaggtggggaggagccggtcctcctgctgcccagcctttcctcccagaggcagctgagcctccactgctgctcccaggtgcaagagctacagcagttgctggtggagagacaagaggagaaggagagcctgggacgggaggtggagagtttgcagagccggctgtccctgctggaggtaggagcagtgatgagtcagggctgggctggggctgggtcggggaacttctctcctacagcagcgacaagacagtcacaccagtgcatgcacagcctcacacacgtgcaaacacacgcaccagacacatgcacccacaaacccacagtcttggctgggtgcgagggcttacgcctgtcatcccagcactttgggaggccgaggcgggcggatcacgaggtcaggagatcgagactgtcctggccaacatggtgaaaccccgtctctactacaaatacaaaaattagctgagtgtggtggtgcgcgcctgtagtcccagctactcttaaggctgaggcaggagaatcacttgaacccgggaggcgtagtctgcagtgagctgaggtcgcaccactgcactccagcctgggtgacagagcgagactcagtctcaaacaaacaaacagtcccacagtcacatgcacccatgcacatttacaaatgtgcacagacacagaaaggaccttcctttcttccccttctccttccttccttccctccctccttccttcctttccttctttcctttccttccttccttccctccttccttcctttctttccttccttccctccctccctccttcccttccttcctttccttccttccttcgttttccttcccttctttcttcctttccttcttccttcccttccttctttcttcctttcctttccttttccttcctttcttctctctttccttctatccttccttcttttttttttttttttttggacagagtctcgctctgtcacccaggctgggatgcaatggtgtgatctcggttcacggcaacctctgcctccctggttcaagcgattctcctgcctcagccttccaagtagctgggtctacagctgcacgtcaccatgtccagctaatttttgtattttttggggagtggggaggatggagtttcactcttgttgcccaggctggagtgcagtggtgcaatctcagctcgctgcaacctccgcctccctggttcaagtgatactcctgcctaccgcagcctcccgagtagctgggattacaggcgcacaccatcacacccggctaatttttgtatttgtagtagaaatggggtttcaccatgttggccaggctggtcttgaactcctgacctcaggtgaaccgcctgccttggcctcccaaagtgctgggattacaggtatgagccaccacactcagacccagaaaggagttttctctaagcatacgcatccatgcagggatggataaccactctctatgcacgtggcggagcatggttaacagcaggcacacccacaaacacacagtttacagacacgcaagaaacaacgtccaagaacacatcatcacacacgcatgcattgcacgtgcacccgtcttgtgcagtcacacacagacaacatgcccacaaatacatacacatgcaacaaatatttcttttttttttttgagacagggtcttgttctgttgtccaggctggagtgcggtggcacgatcatggctcactgcagccttgactttcccggcctcaagcaatcctctcacctcagcctcccgagtagctgggaccacaggcatgtgccaccacacctggctaatttttttctttttggagagatggggactcactatgttccccagtctggtctcgaactcctggcctcaagtaatcctcccatcttacaggtataagccaccaagccccaccagtatttctgaaaacacacaattatgcaaacatgtatacatatagaaaaccatacacacaaacacagagatccacaggcacattcaaaacacaaccacacatacaccagactaaaactcaagcatgaagccggaaacggtggctcacgcctgtaatctcagcactttgggagcctgaggcgagtggatcacctgaggtcaggagtttgagactagcctggccaacatggggaaaccccatctctactaaaaatacaaaaattagccgggtgtgctggcgagctcctgtaatcccagctactcgggaggctaaggcaggagaatcgcttgaactcaggaggcggaggttgcagtgagccaagatcacgccactgcactccagcctgggcgacagagcgagactctctcaaaacaaatcaacaaaaagtcatgcatgtaatctcacatagtcacaggaagggaggggcccccaacccacaacactatacccacacgtatggtcacaaagacacacctccagccagctctttgcatgccaaatggatactgtcgcatccactctcatgcagacaaacacacccacaggtaaccacagcctgccccgagtcccctcacccaggagggaaacgcccatggcacataggccaggaagctgggggatgctggcatacaccatgcatctgataaggagttaataaccaaaatatgtaaggaattaatgcaactcaatacccaaaaaacaacctagttttaaaaatgggggcaggctcggtggctcacgcctgtaatcccaccactttgggaggccaaggcgggtggatcacctgaggtcaggagtccgagaccagcctggccaacgtggtgaaaccacgtgtcactaaaaatacaaaaattagccaggcgtggtggtacatgcctgtaatcccagctactctggaggttgaggcgggagaatcacttgaatctgggaggcgaaggttacagtgagccgagatcgtgccatggcactccagcctgggggcaaaaaaaaaaaaaaaatagggccaggcacagtggctcatgcctgtcatcccaacactttgggagactgaggcaggaggatcgcttgaacccaggagttcgagactagcctgggcgacgtgacgagaccgcatctctgaaaaaaaaaaaaaaaattaaaaattagccaagtatggtgttgcacacctgtagtcccagctgcttggaaggctgaggtgggaggattgtttgagcccagaggttggaggctgcagtgaactatgatcgcaccactgcactccagcctgggtgacagagtaagaccctggctccaaaaaaaaaaaaagtggcacggggagtgggtggcaaaggacatggaaggtgctcactaaatccttgtgggccaaatgcagccatctggtgctcgtgggagacatacaggtatgtgaacagcccagtccccactggagtcttggtggggacacacgggggctgagagcagaaccccgagctggactctgctccctccccccagaacgagcgggagaatactagctatgacgtaaccaccctgcaggatgaggagggtgagctgcctgaccttccaggtgagcccccacctccccacgcactcccagccgccttgtcccctggggccctggaagacggagcctctgggtgtgggggagtttgaagctgggagggaggtttgtactcatccgttttttaaattctgcttggctgagcctgccctgggaaccctgatccaccactccagccccccacctcctgtccccctgtggcccaggtccccagggcctgactctgcgtccccctccaggggccgaggtgctgctgtccagacaactcagtccgtcggcccaggaacacctggcctcgctgcaggaacaggtggctgtgctcaccagacagaaccaggaactgatggagaaggtccaggtagggaaagtgaggctggggacagatctgaggacctagggctggttccctgaggtcagggtgggcagggaaggtggcaaggctgccctgtgtccccacggtcacatcaactcctgccagactcctgccccccactccactccccagatcctggagaactttgagaaggacgagacacagatggaagtggaagctttggcagaggtcatccctcttgccctctatgactctctccgggccgagtttgaccagctacgcaggcagcacgctgaggccctgcaggccctgaggcagcaggagacacgagaggtccccagagaagagggggcagcctgtggggagagtgaggttgctggagccacggccaccaaaaacgggccaacccacatggagctaaatggctcagtggctccagaaaccaaagttaacggagccgagaccatagatgaggaggctgcaggagatgaaaccatggaagccaggactatggaagctgaggccacgggagccgaggccacgggagctgaggccacaggagccaaggtcacagaaacaaaacccacaggggctgaggtcagagaaatggagaccacagaagaagaagcaaacatggaaactaagcccacaggagctcaggccacagacacagagaccacgggagtggaggccatgggggtggaggccacaaaaacaaaagcagaggaagcagaaatgcaggcctacggagtgggtgctgggcaagcagagcccccagtcacagggaccacaaacatggaggccacgggctctagggccacagggatggaatccacaggagtcagtgccacaggtgtggagaacccaggggtagaggccacggtcccggggatctctgctggccccatcctacatcctggtgccgcagaggcctcggaaaagcttcaagtagagctggagaccaggatccgtggcttggaggaggctctccggcagcgggagcgggaggcagctgcggagctggaggcggccctggggaagtgcgaggccgcggaggccgaggcaggccggctgcgagagcgtgtccgcgaggccgagggcagcggggccagcgggggcggtggcggtgacaccacacagctgcgggcggccctggagcaggcccgggaggacctccgagaccgggactcccgcctgcgggagctggaggcggcctcggcctgcctggatgaggctcgggccagccggctgctggcggaggaggaggcgcggggcctgcgggccgagctggcccagcgggaggaggcgcggctggagcagagccgggagctggaggttctgcgggagcagctggccacggccagggccacgggggagcagcagcgcacggcggccgcggaactgggccgggcacgggacgccgctgaggcccgagtggctgagctgcctgcggcctgcgaggaggcgcggcagggcctggccgagctgcgggaggcctccgaggccctccgccagtccgtggtgccggcctctgagcaccgccggctgcaggaggaggccctggagctgcggggccgggcagccagtctggagcaggaggtggtggccacgggcaaggaggccgcccggctgcgcgcggagctggagcgggagcgtgtgtgcagcgtggcgctctcggagcacgaacgcatcgtgggcaccctgcaggccaacgtggcccagctggaggggcagctggaggagctgggacggcggcatgagaagaccagcgcagaggtcttccaggtgagcagggctggtcaccacccgggccccacccccattggccacgtggcggcctgttttagccccgcagccttgaggtgttttgaacccatcagttttacttgaacagacctactttattttatttatttatttatttatttatttatttttgagatggagtttcactcgtgtcgcccaggctggagtgtagtggtgtgatctcagctcactgcaacctcctctttcccggttcaagtgattctcctgcctcagcctccggagtagctggaattacaggcacctgcccccacgcccagctaacttttgtatttttagtagagatgggagttcaccgtgttggccaggctggtcttgaactcctgacctcaggtgatccacccacctcagcctctcaaagtgctgggattatgggcatcagcctccgcacctggccttgaacagacatttgaccctgcagccatcctgacctcttggaattttccacttgtgttttctctctttctttctctttatttctccttccttcctctctctttcctttctttcttcatcccccttccctccccccttccccttcccttcctttctttttttttttttttcagacagggtgtggctctgtctgaaaagtcacccagtcacccaggctggagtgcagtggcacaatcatagctcactgcaacctccacctcctgggctcaagtaatcctcccacctcagcctcccaagtagctggtaccacaggtgtgcaccaccatgctcgtctaactttttaattttttgtaaagacagggttttgccatgttgcccacgctggtctcaaacacctgagctcatggccgggcaccgtggctcacgcctgtaatcccagcactttgggaggccaaggtgagtggatcacctgaggtcacaagttcgagaccagcctggacaacatcgtgaaaccccgtctctactaaaaatacaaaaattaggttggcattgtggcacgtgcctgtaatcccagctactggggaggctgaggcaggagaatcgcttgaacccgggaagtggaggttgcagtgagctgagattacaccactgcactccagcctaggcgacagagcaagactctgtctcaaaaaaaaacaaaaacaaaacaaaaacaagcaaatagtagccaggcatggtggcacctgtggtcccagctacttggaaggccgaggtgggaggatcacttaagcctgaaagattgaggctacagtgagccatgatcgcaccaccgcactccagccaggagtgcaggtccggagcaacagagcaagaccctgtcttaaaaaaaatccaaaaacaaaagaacaaagtagaaggatcatatgaattctggggtctagcatcattggagtcttagtgtcctgagagtcatgcgtgggcttgggccacaggtgcagcgtgaggccctgttcatgaagagtgagcgacacgcagccgaggcacagctggccacagcagagcagcagctacgggggctacggaccgaggcggaaagggctcgccaggcccagagccgggcccaggaggctctggacaaggccaaggagaaggacaagaaggtgggtgccccctctcccacactcagtcagggaggcatccactcagcaaaggttggggccaatctacgaaggtcctcactgcaagggccttggaaaatcaacccattttccagaagggaaactgaggctcagaaacggaaggggacctggttacagcctctgacaagtcagacacacacaggctgctgttccaggtaccaattataaccacagttacatttattttatttttttacttgagacggagtctcgctctgtcgcccaggctggagtgcagtggcatgatctcggctcactgcaacctctgggttcaagcaattctcgtgcctcagcctcccgagcagctgggattacaggcatgcgacaccacacccagctaattttttatatttttagtagagatggggtttcgtcacgttggccaggctggtctcgaactcctgagctcaagtgatccgcctgcctcagcccccaaaagggctggggttacaggcgtgagccactgcgtctgtctccacagttacatttattgagtgcttactgcatgccaggccctgtggactggatgcatttagtcacatccagttctcacaggataggggcttttattatccccatttgaggaaacagaagcacagagaggtgaagtcacttgcctaaggtcacacagccatgcagtctttcagctgggtttgtacccacgttcccacgtttcgttcctaaacaatactaatgatgataacaacagcctccaggtgttagattgggaatttttcacacattacctttttttattgttgttttgtttttttctgaggcagagtcttgctctgtcacccagactggagtgcagtggcgtgatcttggctcactgtaaactctgcctcccgggttcacgccattctcctgcctcagcctcccgagtagctgggactacaggcgcctgccaccacgcccggctaatttttttgtatttttagcagagatggggtttcaccatgttagctgggatggtctcaatctcctgacctcgtgatccgcctgcctcggcctcccagagtgctgggattacaggcgtgagtcaccgcgaccggcctcacacattaccatttttaatcttcctgcaacgctaaaagccagaaagctttttttttttttggcagagtctcactttgtcacccaggctggagtgcagtggtgcaatctcagatcattgcagcttcgacctcctgggttcaagcgatcttcctgcctcagcctcctgagtagccaggactacaggttacaggtgtgtgccatcatgcctggctaatttttttgtttctttcttttttttttgagagaaagtttcactctgtcgctcagggtgaagtacagtggcatgattttggctcactgcaacctcacctcccgggttcaagagattctcctgcctagcctcccgagtagctgggactgcaggcgagtgccaccacacccagctaatttttgtatttttagtagagactgggtttcaccatgttggccaggctggtctcgaactcccgacctcaggtgattcagcctcccaaagtgctgggattacagtcatgagccaccgtgcctggcctgtttttttttgcttttgtttgtttgtttgtttgtttgtttggtaagagatggggtttcaccatattgcccaggttggtctcaaactcttgagctcaagcgatctgtctgcctcagcctcccaaagtggtaggatgacaggcgtgagccaccgcacctggtttcagaaagtatttttgtccccattttccagataagcaaaccaaagctttaagagatgaagtgagtggctcaaagtcacgcaacatgtcactggacaggagacgagacacccagagtcccaggcgcttcagcataaagaatgacccagcctcgactcactgtgggaccttagaccagacacttcacctctctgagcttcagtttcccctctgtaaagggagggcaaaattgcagttaggatgatggtttatctgtagcctggtttcttcccttgcacactgtggacataggagcgggatcatttcctgggctggggccatctgggcattgtaggggactgagcagcgtccttgacctctacccactccaagccaagagctcctccaagtcgtgacaaccacagatgtccccacacaacacccagtgtccccttggggggcagaattgcctcaagttgagaaccccagatctatagtaataataaggcccggcatttattgagtgcctactgttgactaggcacagtttaaacttaatctctgtgcaggatcacagcaactactaagttaagaactattggccgggcgcggtggctcacgcctgtaatcccagcactttgggaggcccaggcaagtggatcacctgaggtcaggagttcaagaccagcctggccaacatggcgaaaccccgtctctactaaaaatagaaacattagccagatgtggtgatgggcacctgtagtcccagctactcaggaggctgaggcaggagaattgcttgaacctgggaggcggaagttgtagtgagctgagatcacaccactgcactccagcctgggcaacagagcgagactctgtctcaaaaagaaacaaacaaaaacaaaaaaatgtgaaaaccaaccttagcttgtgggttgtataaaaacaggctgtgttggtaaccataagcatctaaaatataaataaatacaattaaaacaggctgtgggccagacgtggccctcaggccagagtttgctaaccccagggacgggaccttcccttgaaagcctttatccctggcctcttcctgcggctgcagagaggtcctcagcccccagctctgggcttagggtgatcgctgacagcacctgcaccctcagatcacagaactctccaaagaagtcttcaatcttaaggaagccttgaaggagcagccggccgccctcgccacccctgaggtggaggctctccgtgaccaggtgaaggatttacagcagcagctgcaggtaaggactgggccacgcaggggccaggggaccatcagggtggaggagtccaaatatttaccaatcagcacagcgcaggtgggaatcccaggagaggggctggggtaggcaggtggggtccacatcacatgcacggcatggccaggaaatacttcctttattttttttgagacagggtctcactccatcgcccaggctggagtgcagtggcacaatctcagctcactgcagcctccaccttccgggtttaagcaattttcatgccttagcgtcctgcgtagctggaattacaggcacgcaccaccacacccagctaatttttgtatttttagtagagatggagtttcaccatgttggcaaggctggtcttgaactcctgggctcgcataagcctcccaaaacgctgggattacaggcataagccactgctcctggccgccctctgccttttttttggacataggatcttgctctattaggctggagtgcagtggtgcaatcatagctcactgagcagcctcaaactcctggcctcaagcagttctccacctcaacctcccaaagtgcctggccatacatatatatatatatatatatatatatatatttttttttttttttttttgagccagtctcactctgtcacccaggctggagtgcagtgacacgatcttggctcactgcaacctctgcctcccggctcccgggttcaagtgattctcctgcctcagcttcctgactagctgggactacaggtgtgagccaccttgcctgggaaattttttgttttttttgagtctcactttgtcactcaggctggagtgcagtgcacgatctcagctcactgcaacctccgcctcccgggttcaagcgattctcctgccttagcctcctgagtagctgggactacaggcatgtgccaccactcccggctaattttttttacttttagtaaagacggggtttcaccatgttagccagggtggtcttgatctcttgaccctgttatccgcccgccttggcctcccaaagtgctgggattacaggtgtgagccactgcacctggccaatttttgtatttttagtagagacgggattttaccatgttggtccaggctggtcttgaactcctgacctcaagtgagccacccacctcagcctcccaaagtgctgggattacaaatgtatgccactatgccccgccatattttcatattttagcagtcggccatcaacgtacaggcttggggtgcaaagggtgctttttggtgtgttttgctcagtggggaggtgctcctgctcttctgagcgccccttcctcatgcccacaggaagctgccagggaccactccagcgtggtggctttgtacagaagccacctcctatatgccattcaggtgagtggcccagctcctgggtacccggtggctttgggcataccactgttgctctctgagcctcagtttccccttctgtacagtgggaggctggtctggggagaggttcgtggcatgtgggagcccccctgtgtgcatttccctcctggctggcttggtctatgggagtggtggagggacttggggcagccatggagggtatactcagggtcttcctctactcccccaaccctagggccagatggatgaagatgtgcagcggattctcagccagattctgcagatgcagagactccaggctcagggccgctgagaaaggccaggcccagtggctacactgaccacacccacgcagggacctcacccccctgcaggccccttgcagaccggcttcacttggcttcacttggccctatccaggcccatgcacttggagaccagcctggttccctgcccgaccacccccagctggctccatcaccccacctggtctctgcacgcacacactggtcagtctggacccgggccgtgactgcccctcccccaccaccggagactgtgattccctgtgtcctccacatccagacgccagcccaggaataaaggcattctgtgcacagggccaacgcgtgccgtctcgttgctgggcttccactgcggggagcggagagggtggcccagaaaaggaagcgctcacacccctccccacctaccccacgccacaaatcagccatcaggataaaccccatcttttttctttcttttttttttttttttttgagatagagtctcgctctgccgcccaggctggagtgcagtggcgccatctcggctcactgcaagctctgcctcctgggttcacgccattctcctgcctcagcctcccaagtagctgggactacaggcgcccgccaccacgcccggctaattttttatatttttagtagagacgggtttcaccatgttagccaggatggtcaatttcctgacctcatgatccacccgccttggcctcccaaagtgctgggattacaggcttgagccaccgcacctggcctcttttatttttttttatgcggagtctccctctgtcacccaggctggagtgcagtggagtaatctcgactcactacaacctctgcctcccgggttcaggtgattctcctgcctcagcctcccgagtaactaagattacaaggcatgtgccaccacacccggctcatttttgtatttttagtagagacagggttccaccatgttcgccaggctggtctcgaactcctgacttcaggtgatccatccgccttggcctcccaaagtgctgggaatacaggcatgagccatggtgcccggcctttggataaactccatcttaatgcaatatttcaaaaaggcaaaatgggtgcaaaaaaagtgcatgctgaactaagtatggaaatgttaaagaaaggcaggcttggccgggtgcggtggcccatgcctataatcccagcattttgggagaccaatgtgggaggatctcttgagcccaggagttgaagaccagcctgggcaacatggggaaacccccatctctatcaaaaatacaaaaattagctgggcatggtggcgcgcacttgtggtcacagctactcaggaggctgaggagggaggaccgcttgagtgcagcagttagaggctgttgcacttcagcctgggtgacagggcaagaccctgcctctaaaaaaagatttaaaaaaaaaaaaaaaggaaagaaagatactttcctaaatcctaaggctggccatggtggaagccccctacccccagcctctccctgccccttggcaactcccccgaaatccccacgggtttcttggcatttttcagcaaacagaggggaggcaggagtgggagcggggatccccgagcctgtccagcctgcccctgggggtttccttgttcctgggcatcctgatcgctgggatatctgcggtggcagctgcctcccctggcctgcgctcctgtgtctctctctgtctctcttctccatgtctctgtctctctctttttttttttttgagatagattttcgctcttattgcccagactagagtgcaatgatgcgatctcggctctctgcaacctccacctcccgggttcaagcaattcccctgcctcagcctccggaatacctgggattacaggcacgtgccaccatgcccagctaatttttgtatttttagtagagacggggtttcaccatgttagtcaggctggtctcggactcctgacctcaggtgatccacccatattggcctcccaaagtgctgggattacaggcgtgagccaccgcacccagtctccacgtctctgtctctatctcttggtctccatctgtctgtcttgctgttttgtctgtctccctgtgtctttgtctgtgtcttcctcctctcttatctctgtctctctgtgtttcttttgctctgtctctgtctctctcatgtccccatctcccatctctctgtctctttctatctctgtcttcttttttttttttttttgagacggagtctggctctgtcgcccgggctggagtgcagtggcgccatctcggctcactgcaagctccgcctcccgggttcacaccattctcctgcctcagcctcctgagtagctgggactacaggcgcctgccaccacgcccggctaatttttttgcatttttagtggagacggggtttcaccatgtcagccaggatggtcttgatctcctgaccttgtgatccgcccgcctcggcctcccagagtgctgggattacaggtgtgagcccccacgctcagcctttttttttttttttttttttgacacagagtctcactctatctcccaggctggagtgcagtggcgtgacctcggctcactgcaacctcctctcactgcaacctccgcctcccaggtttaagcgattctcccacctcagcgtcccaagtagctgggattacaggtgcgcaccacaacgcccagctaattcttgtatttttagtagagacggggtttcaccatattggccaggctggtctcgaacttctgaccttgtgacccgcccgcctcagcctcccaaagtgctgggattagaggcgtgagccaccacacccggccctctgtcgtcttctcttatctctctgtctctctttctgtgtctgtcatctccccgtatctctatttctgtcttcctgtcttctttctgtctctcttttgtctctctttctccatctctgtcattgccccatcagtctttttgttgttgttgttgttctttttgagatggagtctcactctgtcacccaggctggagtgcagtggtgtaatcttggttcactgcaacctctgcctcccaggtttaagtgattctccttcctcagcctccagagtagctgggattacaggtgcctgccaccacgcccagctaatttttgtatttttagtagagacagggtttcaccattttggtcaggctggtctcgaactcccaacctcaggtgatccatctgccttggcctcccaaggtgctgggattacagccgtgagccaccgtgccccaccatctctctatctctgtctatcctactctctcatctctgtctctctgtctctgtctctcatcttcccatctgtgtctctctttctctgtcttcctcccttatctctgtctctgtgtctctctcatttccctatctctgtcttcctctcttatctctgtccctctgtctctcttcctctgtctgtctgctctctgtgtttctctttctgtttccatcatctccctgtctctctctgtctctgtgtcctcctcctctcatctctgtctctgtctctctcattcccctgtctctctctgtctctatcatctccctatctatctctgtgtcctcctcctctcatctctgtctctctctgtgtttctgtctctgtcatccccctttctctgtctctgtcatctccctgtctctctatctctgtgtcctcctcctctcgtctctgtctctctgcctctctcatctgtatctctctctgtctctgtcatctccctgtctctgtctctctctatctctgtgtcctcctctcatttgtctctctgcctctctcatctgtatctctgtcactttctctgtcatctccctgtctctctatccctctatctctgtgtcctcctctcatctgtctctctgcctctctcatctgtagctctctctgtctctgtcatctccctgtctctctatccctctatctctgtgtcctcctctcatctgtctctctgactctctcatctttgtctctgtctctgtctctgtcatctccctgtctatctccgtgtcctcctcctctcatctctgcctttctcatctctgtgtctctctctgtgtttctgtctctgtcatgcccctttctctgtctgtcatctccctgtctctatctatctctgtgtcctcctcctctcatctctgtctctctcatctgtatctctctctgtctctgtcgtctccctgtctctctatctctttgtcctcttcctcttgtctttctctctgcctctctcatctgtgtctctctctgtctctgtctctgtcatctccctgtctctgtctctctctctctgtgtcctcctcctctcgtctctttctctctgcctctttcatctgtgtctctgtgtctctctgtcatctccctgtctatctctgtgtcctcctcctctcgtctctgtctctctgcctctttcatctgtgtctctctgtctctgtctctgtcatctccctgtctctgtatccctctatctctgtgtcctcctcttcttgtctctgtctctctgcctctctcatctgtgtctctctctgtgtctctgtctctgtcatctccctgtctctctgtgtcttccttctgtcttctctgtctctctgcctctctcccccatctctgcctctgtctccctccatgtccctgagcccctgcctgcctgcctggggtttcccccgcttcagggcagcggaaggaaggccagcaggacatgctgtgctgggaaaagccagcaggtctccacttctccctttcacagcctcctcccccgcccccaccctcggggccttccgagcaggggtggcctgtgctccccagggggctggggctcctccacaccctaattcatctccctagcggccccacgagccccaccagtgagtcagacctgaaggaagtcggggagggggcgggccttgaccctgggctgggctttcccctgggcaggtcccaagtcctcacctcccctctcaagtctcccacgacgttcccacccactcctgagagcagagctggccgcagccatgaccccgcagcttctcctggcccttgtcctctgggccagctgcccgccctgcagtggaaggaaaggtatgtggggcccctgggggactggggggcccaggcagacggacatgacacgaggactggcctcggatcatgtctggggtgggaaatcacatcctcccgtgcccaatggtgggatggggttaccctcccattgtacagatggaggaactgaggcacagagaggcagagtgccacattgggggtggaaggatgtcaccttgtgggtgatagggactggcagtcacagctcagaggtatccatagagctacacagacatagctacacagacatgcgaatttgagtcacactcattcctttggtttctttttggttttgttttttgagacagagtctcactctgtcgcccaggctggagtacagtggcaccatctcagctcactgaaacctccatctcctgggttcaagcgagattctcctccctcagcctcccgagtagttgggattacaggtgcccgccaccatgcccggctactttttatatttttagtagagatagggttttaccatgttggccagggtggtcttgaactcctgacctcaggtgatccacccacctcgggctcccaaagtgctgggatgacagatgtgagccaccgcgcccggccgacattcattcattttgcactagagaacatctccatgtccttgaagacaaaatggttacagcagggcatggtggctcatgcctgtaattccagcactttgggaggccagggcgtgaggatcgtgaggccaggaattcgagaccagcctgggcaacatagtgaaaccggaccccaccaatctgtacaaaaaattaaaaaattagctagatgtggtggcacgtgcctgtagtcccagctacttgggaggctgaggtgggaggataatttgagcccaggaattggaggctgcagtgagctatgattgtgccactgcattccagcctaggtgacagagtgggataccttgtctcaaaataataataataataataatttataggctgggtttggtggctcacgcctgtaattccagcactttgggaggccaaggcaggtggatcacctgaggtcaggagtttgagaccagcctggccaacatggtgaaactccctctctactaaaaatacaaaaattagccaagcgtggcagtacatgcctgtaatcccagctactcgggaggctaagaatcgcttgaacccgggaggcgggggtggcagtgagccgagatctcgccactgcactccagcctaggcgacagagggagactccctctttaaaaaaaaaaaacaattacaaaagagagaacacggtaaaatctctctctcttacccgagttcctctctgtagatgcttaaacctcagcttccctatctggaaaatgggctagtagtcctcacctagatggattgcagtggggataaaagatgacagatgacttttgtccatgtacctatttattccgaaagcctttattaggcacctaccatgtacctggtgctggctggcaacgtggcaggagcccagcgcacgggagggctatgacaatctgggggtaaaccagaagctcactctttctgtcttcctccagggcccccagcagctctgacactgccccgggtgcaatgccgagcctctcggtacccgatcgccgtggattgctcctggaccctgccgcctgctccaaactccaccagccccgtgtccttcattgccacgtacaggtcggagagcctggaagggggcctcagggacactggacttcctggagagcccagaactctggccctgagagccctggggtcaggaaaactggagaccccgacatcctgaaccccaggcctatggaattctagggcggccccgtccaatagaaatatactttctgggccaggcacagtggtgcatgcctgtaatcccagcgctttgggaggccgaggtgggcagattgcttgaggtcaggagtttgagaccagcttgggcaacgtagtgagacactgtctctacgaaaaattttaaaaattggtcaggtgcagtggctcatgcctgtaatcccagctactccggaggctgaggcaggagaatagcttgaacccaggaggcggaggttgcagtgagccaagatggcaccattgcactccagcctgggcaacagagcaagactccatctcaaaaaaaaaaaaaaaaaactacttcctgggttgggcacagtggcacatgcctgtaatcccagtactttgggaggctgatgtgggaggatcacttgaggtcaggagtttgagtccagcttgggcaaaatagtgagaccctgtctctaaaaacaatttttaaaattagctgggcatggccaggcgcggtggctcacgcctgtaatcccagcactttgggaggccgaggtgggcggatcacaaggtcaggagatggagaccaccctggcgaacacggtgaaaccctgtctttactaaaaatgcaaaaatttgccaggtgtgatggcacgcgcctgtagtcccagctactcgggaggctgaggcaggagaattgcttgacccaggaggtggacgttgcagtgagccaatattgcatcgctgcactgcatcctggtgatagagtgagaccccgtctcaaaaaaaaaaaaaaaaaaaaaaagaaaagaaaagaaaagaaaagaaaagaaaaaatttcgaaaaagaaaaaaaaattagctgggcatgttggtacttgcctgtagtcccagctactctggaggctgaggtgggaggatcacttgagcccaggagtttgagaccagcctgggcaacatagcaatatcctgtctgtacttaaaatcaaaaaaattagctggatgtaatggcacacatctgtagtcccaggtacttgggaggccgaggtgggaggatcacttgagcccagaagttcaagaccagcctgggcaacatactgagacccccccccatctgtagaaaaaaaatttaaaattagccaagagtggtgatgcgtgcctgtagtcccaaccgctctggaggctgagacagggaagatcccttgagccaggagttcaaggctataatgagctaggatcatgccactgcactccagcctgggcgccagagggagaccctgtcatgaatgaatgaatgaatgaagggatgaattaatgaatgaatgaaggaatgaattaatgaatgaatgaaggaatgaattaatgaatgaatgaacggatgaatgaatgaatgaatggatggatgaatgaatgaatgctgacatcccagaaacctttagaatcccggaccctagcatctagcttgggttgtaatccccgacctgaaccatcaggggcaccgtgatgttggggcccatgccctgcccccggggggtggcacggccaccaccaggaccccaccccgggatccccatccgctgccccctcctgttcctgcctctccttggggtcccgggtcaggcccggcagtaggaggtgctgaggccacaggcactccctgaggcgctcagcgagccccaccctgtgcaggctcggcatggctgcccggggccacagctggccctgcctgcagcagacgccaacgtccaccagctgcaccatcacggatgtccagctgttctccatggctccctacgtgctcaatgtcaccgccgtccacccctggggctccagcagcagcttcgtgcctttcataacagagcacatcagtgagtgggggcggcagtgggggcgggggcggggctgccgtctccttccagctccccccaccccacctcccacctgtcctccagtcctgcggctgcaccttcacacttaagcaaaaatctgaccccttcttccccctcctctaccagtacgtggagcacccccatcattgacagcccagtcccctccatcctgagccctggcctccacagtctgtccttcccacagcagccaccagagggcgcctgagagcacctgagtcagggcacgtccctctgcctacagccctccatggctcccacctgccttggggtcaaagcccaagtccttcctactgcccaccaaaccctggacaacctgccctgtctcctccatgccctcccctcctccctgtctcccccttgctcactctgctgtggccacatgtgattccttgatgttcaacatgccaggaatagttctgccccagggcctttgcatgggcggtgccctctacctggaacaccttcccccaaatgtccccatgacttattccctcacctccttcgggtctctgtgcatacatcacctcctcagtaagacctctcctgagtagattattaaaaattgcaagctctggctaggctcagtggctcacacttgtaatcccagcactttgggaggctgaggcaggccgatcacctgaggtcaggagtttgagaccagtcctggccaacatggtgaaaccctgcctctactaaaaatacaagaattagctgggcatagtggcaggtgcctgtaatcccagctactcagggggctgaggcacgagaatcacttgaacccaggaggtggaggttgccgtgagctgagattgtgccactgcattccagcctgggcgagagagcgagactctatctcaaaaaacaaaacaaaacaaaacaaaaattgcggccactgccattcctgcactccccagctttcttccctattctgtgtgacctatggatttgtttatttcctgtcttccccctgatggattgtgagttccatgaggacaggggtaggtcagttaaggtcactgttttgtcccctctgtggcagccccaggcacacagtttctcaataaatatttgttggttgagccaggcatggtggctcacaactactcgggaggctgaggcaggagaatcgcctgaacctgggaggcagaggttgtagtgagctgagatcacgccgctgtactccagcctgggtgacagagtgagactccgtttcaaaacaaacaaaatatatacataatatgttggttgaatgaatgagtgaatgaatgaatgactggacttactgtcccctgaccctgcttcctgcttgtccgtcagtcaagcccgaccctccagaaggcgtgcgcctaagccccctcgctgagcgccagctacaggtgcagtgggagcctcccgggtcctggcccttcccagagatcttctcactgaagtactggatccgttacaagcgtcagggagctgcgcgcttccaccgggtgaggaggatgagggggaggctggaaagggtggtgcctggcagagggaatggtttttaccaagactagcaggtgtgctgggctcttgcacatagcttgcgattccgggtgcattgaataagagcagtccagcaatctgattcctaggcctctaccgaaaaggatggaaagcagggacttgcacaagctgtcgcacacccgtttttgttgttattgttttgagacagagtctcgctctgtcgcccaggcagtgacacaatctcggctcactgcaaactccgcctcccaggttcaagcgatgctcctgcctcagcctctggagtagctgggattacgggcacgtgccactatgcccggctaatttttgtatttttagtagagatggggtttcatcatgttggccaggctggtctcgaacttctgatctcaggtgatctgcctgcctcggactcccaaagtgctgggattacaggcgtgagccaccgaattgttcactttattgattgattgattgaaacaaggtctagctctgtcacccaggctggagtgcagtggcgcgatcttggctcgctgaaacctccgcctcccaggttcaagtgattctcctgcctcagcctcctgaatagctgggactacaggcgcccaccacgcccggctaatttctgtattttcagtagagatgggattttgccatgttgcccaggctggtctcaaactacggagcttaggtgatccacctgcctgggcctcccaaagtgttgggactacaggtgtgaggacttcatctggccagaattagccattttaaagtgaacaattctggctgggcagggtggctcacacctgtaatcccagcactttgagaggccaagttgggaggattgcttgagtccaggagttggagaccagcctgggtaacatagtgagactcccatctctacaaaaaatttaaacattagttgggtgtggtgacacacacctgtacccccagttacaagaggctgaggtgggaggatcacttgggcctggaagattgaggctgcagtgagccgtgttggcaccactgccttccagcctgggtaacagagagagactctgtctcccaacttaaataaattaaataaaataaaaagcacggttaggctaggtgcagtggctcatgcctgaaatcccagcactttaggaggccaaggcaggcagatcacttgaggtcaggtgaaaccccatctctattaaaaatacaaaaattggcctggcgcggtggctcatgcctgtaatcccagcactttgggaggctgaggcaggcagatcacgaggtcaggaattcgagaacagcctgaccaacatggtgaaatcacagctctactaaaaatacaaaaattagccgggtgtggtggcgggcgcctgtaatcccagctactcaggaggctgaggcaggagaatggcttgaacccgggaggtggaggttgcagtgagctgagatcatgccactgcactccagcctgggtgacagagtgagactccgtctcaaaaacaaacaaacaaaaattagccaggcatggtggcgggcgcctgtaatcccagctatctgggaggctgacgtgagaggatggtttgagcctggaggcagaggttgcagtaagccaagattgccccactgcactccagcctgggcaacagagtaagactgtctcaaaaaaaaaaaaaaaaaaaaaaaaagcatggttaatatagtgggaccaggggtaaagggaggtatggggtcctatcccagaggtcctggtttagtcccagggaggagaaagaagaggattatagggatcagggatgtcctgatgaacaaagaccctcctgggtgagacatccacaggggctagtgtggtccaggaaggattcgtaagagaggtggctctgggggccacacagacagaggccgggattgggaggagcccatgatgctatttggggtggggccgcacagctggggccagagtcctggactggagcctgcagggggcagggaggactgcacgctccgttgtgtggttctgtgcacagtggcccctctccatcttctggttctagtgacctgacgctctctcttctctcaggtggggcccattgaagccacgtccttcatcctcagggctgtgcggccccgagccaggtactacgtccaagtggcggctcaggacctcacagactacggggaactgagtgactggagtctccccgccactgccacaatgagcctgggcaagtagcaagggcttcccgctgcctccagacagcacctgggtcctcgccaccctaagccccgggacacctgttggagggcggatgggatctgcctagcctgggctggagtccttgctttgctgctgctgagctgccgggcaacctcagatgaccgacttttccctttgagcctcagtttctctagctgagaaatggagatgtactactctctcctttacctttacctttaccacagtgcagggctgactgaactgtcactgtgagatattttttattgtttaattagaaaagaattgttgttgggctgggcgcagtggatcgcacctgtaatcccagtcactgggaagccgacgtgggagggtagcttgaggccaggagctcgaaaccagtccgggccacacagcaagaccccatctctaaaaaattaatataaatataaaataaattagccaggtgtgatgttgcgcgcccacagtcccaactacttgggaggctgaggtgggaggatcacttgagtccaggaggttaaggctgcagtgagctgtcgtcacaccactgccttcatgcctgggcaacagagcaagaccctggtttttttgtttgtttgtttgtttgttttaatcatagttgaggccgggtgcggtggctcgcgcctgtaatcccgacgccgaggcgggcagatcacgaggtcaggagttcgagaccagcctgaccaacatggtgaaacccggtctctactaaaaatacagaaattagctgggcatggtggcctgagcccgtaaccccagctactcaggaggctaaggcaggagaatcgcttgaacctgggaggcggaggttgcagtgagctgagattgcaccactgcactccagcctgggcaacagagcaagactccgtctcaaaacaaaaacaaaaaaaataatagttgaaatgaagactccagctgggtatggtggctcacgcctgtaatctcagcactttgggaggccaaggcaggtggatcacttgaggtcaggagttcaagaccagcctggccaacatggtgaaaccctgtctcgactgaaaatacaaaaattagccaggcgtggtggtgggtgcctataattccagctactcgggaggctgaggcaggagaattgcttgaacccgggaggcagaggttgcagtgaactgagatcgcgccatcgcactccagcctgggcgatggggtgactaagactccgtctgaaaaaaataaggaaatgaagactcctcttttcacttagaggagatccagcgaggacttagccctaaaccaaaggacacagaaaccacaaatccccactcccatagtgtcagggctggaccaggggacgtcatgggcctggggatgccagggtggggtggcagggattccgcctggagtgggacagtagaatccattcaggggcaggtgcggtggctcacgtctgtaatcccagcactttgagaggctgaggcgggtggatcacaaggtcaggagttcaagaccagcctggctaagatggtgaaaccccatctctactaaaaataataatacaaaaaattagccaggcgtgggtatccgcctgtagtcccagctactcgggaggctgaggcagaagaattgcttgaacccaggaggtggaggttgcagtgagccaagatcgcgccactgcattccagcctgggtgacagagcgagactcgatctcggaaaaaaaaaaaaaaaaaagaatccattaagaatccattcagattagcagttaggttggttcgcccagatgtcagcctcattgaggatagacaccaataaggtatgagtggctctggggagatttaactgaacagtgggcaaggaaggcagccaggccctgaaggagagagaaacagccttgggcttgtctgtgggttccacctgggtctccagtcaaaagtcacctcctccgagaagccttccctgactaccccatctgtggcaggtagagtaacactccccaatcccgcaaagacatccatgtcccaatctccagagctcatgagtattttgcctgatgcagccaaaggaactttataggagtgattacattaataatctcaaaggtctttaaagatgaaagatctttcatcaaattaatgaaaatgggccgggcgcagtggctcacgcctgtaatcccaacactttgtgaggccaaggcaggagaattgcttgaggccaagagctccagaccaacctgggcaacatagtgagacccccatctctaaaaaaataaaataggccaggcatggtggctcatgcctgtaattccagcactttgagaggccgaggtgggtggatcacgaggtggggagttcgagaccagcctgaccaatatggtgaaaccctgtctccactaaaaaatgcaaaagttagccaggcgttgtggcacacacctgtagctccagctactcgggaggctgaggcagaagaatcacttgaacccgggaggcggaggttgcagtgagccgagatcgtaccactgcacttcagcctgggcaacagagcgagactgtctcaaaaaaaaaaatagtaataaaataaaataaaataaaaataaaataataaaataagttagccaggtgtgatgtcgcgtgcccatagtcccagctaatcaggagactgaggtgggaggatctcttgagcccaggagatcaaggctgcagtgagctatgatctcaccactgtactccagcctgggcaacagagcaagaccctgtctcaaaaaaaaaaaaattagccgggctcagtggctcacgcctgtaatcccagtactttgggaggcccaggtgggcagatcacaaggtcaggagttcgagaccagcctggccaatatggtgaaaccctgtctctactaaaatacaaaaaaatattagccagacatggtggcatatgcctgtagtcctagctaatcgggaggctgaggcaggggaatcgcttgaacctgggagggggaggttgcagtgagccgagatcgtaccactgcaccccagcctggcaacagagcgagactccgtctcaaaaaaaaaaaaaattaaaaattagctgggcttggtggctcacagctatagttccagctacttgggaggccaaagtggcagaatctcttgagtccaggaggaagaggctacagtgagctgtgatcacatctctgcactccagcctgggtaacagagaaagactccatttcaaaaaaaaaaaaaaaaaaaaagccaggcacggtggctcacgcctgtaatccagcactttgggaggctgaggcgggcagatcacgaggtcaggagatcaagaccatcctggtgaacacggtgaaaccctgtctctactaaaaatacaattaaaaaaattagctgggcatggaggcaggcgcctgtagtgcccgctacttgggaggctgaggcaggagaatggcgtgaacctgggaggcggagcttgcagtgagccttagatcgtgccactgcactccagcctgggagacagtgagactccttctcaaaaaaaaaaaaagaaaaaacaagtatttctaaaaaatttaatagatgccaggcacagtggcttacgcttgtaatcccagcactttgtgaggctgaggcggctgaattgcttgagctcaggagtttgagaccagcctgggcaacatagtgagaccccatctctacaaaaaatacaaaagttaggcaggcatggtggtacatgcctgtggtcccagctactctggaggctgaggcaggaggattgcctgagcccaggaggttgaggcttcaataagctatgattgtgccactgcactccagcctgggtgagacagtgagaccccgtctcaaaaaaaaaagattaatagggatggggtctcaccatgttcctcagactagattccaactcctagtctcaagcaatcctctcaccttggcctcccaaagtactggaattacagggctgatgagccaccatgctcagtccattttttatttctgacctgtaaaactataataaatgtgtgtcgggcagaggcagtggctcatgtctataatcccaacattttgggaggctaaggtgggaggatcacttgaccccaggagtactagaccagccatggcaacatatcaagaccctgtctctcaaaaaaaaatttaaaatttagctgggcatggtggcatgcacttttagtcccagccacttgggaggctgaggtgggaggatctctgagtctgggagcttgaggctgcagtgactatgatcatagaaccgcactccaccctaggtgaaaaagcaagacgtgtctcagaaaaaaatataaataaataaaacaaatgcatgttgttttcagacactgagttggtggtcaattgttacaacagccataggcccctcaagcatcacctacaattgaccctttccatcactatccatggtcaaaagataaagctgcaaccttggccaggtgcagaggctcatgcctgtaatcccagcactttgagaagctgaggcaggtgaatcacttgagctcaggagttccagaccagcctggccaacatggtgaaaccccgtctctactaaaaatacaaaaattagctgggcgtggcacacgcctgtggccccagtgacttgggaggctgaggcaggagagtcacttgaactcgggaggtggaggctgtggtgagctgagatcgcgtcactgcactctagcctgagcaacacagtaagactgcatctcaaaacaaaacaaaacaaaaatgctgcaacctatatagttcagagatctgaattgggttttctttgcaattctggaatcaggcaacacctcatttcatcaaatcgaattagctactaaaacaccaggtgtttggtctaggtcttgctgccctctgcgcagaaagccaatcaccgaggcaacaaggattgccagggaggaatgctttatcctgccgctgcagtcaatgagaaggggtggtaaagtctcatatgtctccctgaccaactaaaattggggagtttatatagctggggaatgggagaaaacaaattcagggagggtgttaaggaagtaatcttgatggatgatggggtctggcctctcattgtctggatgtgatgatctgatgagtttcagttccttgcctgatggtcagtttcctgaggaaggaactgagatgagacaaatgtaagtttcaagttttaagactagggaggatccatttctgtgtttattcaaataatcataagtattcgttttatggaacaattggaccagtttcagaatgtttccatgagctgagcagacaacattaggggttctttttctttcttttttaaagtctgttaaaccttccattttttttttttcccgagacagagtctctctctgtcacccaggctggggggcagtggcgtggtcttggctgactgtaacctccgcctcctggattcaaatgattctcttgcctctgcctcccaagtagctgggactacaggtgcccatcatcacacccggctaatttttgtatttttagtagagatggggtttccccatgttggccaggctggtcttgaactcctgacctcatgatcaacccgcctcagcctcccaaagtgctgggattacaggaatgaggcaccatgcccggccaaaccttccacttttgcaaagcaggttttatttatttattttgagacggagtttcactcttgttgcccaggctggagtgcagtggtgatctcagctcactgaaaaagaggttggttttatagacagaaaaaggctgagtaaagcagaaatagaaaacaaaaagtggattggtcttttcaaagttacttttcttgtcaagtttagagcaaaggagactatcgtgctggctaaaacaggcctgttcagggatttttttttttttttttttttgagacagtctcgctctgtcacccaggctggagtgtagtggcacaatcttggctcactgcagcctccacctcccgggttcaagcgattctcctgcctcagcctcccaagtagctgggactacaggcgtgtgccaccctgcccagctaatctttgtatttttagtagagacagggtttcaccatgttggccaggatggtctcaatctcctgacctcgttatccacccgcctcccaaagtgcagggattacaggcatgagccacagtgcctggcctttttttttttttttttgagacagaatctggttctgttgcctaggctggagtgcagtggcatgatctgggctcactgcaatctccgcctcccaggttcaagcaattctcgtgagtcagcctcccaagtagctgggattacaggcacccaccaccgcaccccgctaattttttgtattttagtggaaacggggtttcgccatgttggccaggctggtcttgaactcccgagctcaggtgatctgcctgcctctgttcatggatttgactattccctctctttctctctctccctctctctctctctctccccacttccttccagttctcgatttcttggaaaaccagaaaaacaacttagtttcagcttggtgtaaaacttccgcatgagggacttcattttggtttagtcttttgggcctagtgcaggagctcagtccaaacccatggcttcctgtaaactttatttaacaccattccttgtcccatattattgtcttcctggtgccaggaaaaggggtccctagctgggtgtggtggctcacacctgtaatcccagcactttgggaggctgaggtgggtggatcacctcttgaacacctcaggagttcaagaccagcctgaccaacatggagaaaccccgtctctactaaaaatacaaaattagccggacgtggtggcacatgcttttaatcccagctacttgggaggctgaggtaggagaatagcttgaacctgggagacggaggttgcggtgagccgagattgtaccattgcactccagcccgggcaacaagagcaaaactcctcaaaaaaaaaaaaaaaaaaaaaaaaaaaggaaggctactcagttacaaagtagggcgtcctcagaaaacaagaggaggaacgccttgtctttgttttaaggtttttatttttattttatttattgatttatttttgagatggagtcttgctctgtcacccaggtacaatggcacgatcttggcacgatcttggctcactgcaacctccacctgccaggttcaagcgattctcctgcttcagtctcctgagtagttgggattcaggcatgtaccactgcgcccagctaatttttatatttttagtagagacgaggttttaccgtgttggccaggctggccttgaactcctgagctcaagtgatcctcccacctcggcctcccaaagtgttgggattacaggtgtgagccaccatgtacaaccggttttttcttatataggggtcttatctgtgtgaaagctatgtccacgtgtaggtgggctgaccgcgtgacaaaacgtagtactttgtcgacttaaagaaagttatcctggctgggtgcagtggctcacacctgtaattgtaacactttggtaggccgaggccggcagatcacttcagcccaggatttccagaccagcttgggcaacatggcgaaaccctgtctctacaaaaactgccaaatattagccaggtgtggtggtacctatagttccagctaactcggaaggctgaggtgggggatcgcctgagccgggaagtggaggccacagagagccatgattgcgttactgcactccagcctaggtgacagagcgagaccctgtctcaaaaagtatacatacatatccttgccattttagtgcctaagtacattacaccatgactataaccatattttctttttttttttttgagatggagtttcactcttgtcacccaggctggagtgcaatggcgccatatcgactcaccgcaacctctgcctcccaggttcaagtgattctcctgcctcagcctcccaagcagctgggattacaggcatgcaccaccatgcccggctaattttgtatttttagtagagacaagatttcttcatgttggtctggttggtcttgaactctcgacctgcaccaccgcacctggctaattttgcatttttagtagagacggggtttctccgtgttggtctgattggtcttgaactcctgacctcaggtgattcgcccacgtcggcctcccaaagtgctgggattacaggcgtaagccaccatgcccggtatctttttcttttttttctctttttttttttttttgagatggagtctcactctgtcgcccaggccacagggcagcggcacaatctcgatctcagttcactgcaacctcagcctcctgggttcatgcaattctcctgcctcagcctcccaagtagctgggattacaggttcccgccaccacgcccggctaatttttgtatttttagtagagatggggttccaccatggtggccatggtgaccaggctggtctcgaactcctgacctcaggtgatccaccctccttggcctcccaaagtgctgggattacaggcatgagccaccgcgcctggcgactataacgatcttaaaagcatacattgctatgcaatatcaggacatctggaccttccattgttgtagtagtgtgtcctcctaggcatttgtaagacgttttctcaattgtaaacatcttatgaccctggctcgtgactggcagcgaatgtgccttgttaattttaagatggagttgatttttggccaggtgcagtggctcatgcctgtaatcccagcactttgggaggcagaggcgagcagatcacctgaggtcaggagttcgagacctgcctggccaaaatggtgaaaccccatctctactaaaactacaaaaattaggcaggtgtggtggtgcgtgcctgtaatcccagctactcgggaggttgagacaggagaatcacttgaatcctgaggtggaggttgcagtgagccaagatcgcaccactggaggcagaggttgcagtgagccaagatcgcaccactgcccgtcagcctgggcaacagagcaagactcctcaaaagataaataaataaacaaacaattgccacagcaacatcaagaagttaccctatatggtctaaaaaagggaggtatgaataatccaccccttgtttagcatatcatcaataaatcaccataaacatgggcaaccaccagcccttggggctgctttgtctgtgaagtagccattcttttattcatctactttctaaataaacttgtttttgctttgcactgtggactcgccctgaattccttcttgcacgagatccaagaaccctctcctggggtctggatccggacccctttcctggaacaatctgacacagaggaaacgtccatgaaaggtggggaggaggctggggaaggaggctggggaaggaatgggatgggaagtcctcgttaaggggaaggcacaggtgggcaatggagggacatttgggagacactgcgtatgtttaggaagttggtttggagcctgatctttaagtcaatgtctgtgactcaagagtcgtccagggtcctcttaagtcaccctatgtgtggccccaaccccatgtgagagttgcgggcccaggaacgatgtgtggattcccagagcccagaatacaaggcaggcgcataatacatatttgctgaataaaagaatgaagaacaagaggtcacgttacaaaattttaacgagccgctgcccgcttctagggggcgcagcgcactatacaaaattctccaattccacatggctcccggaatccttatttcgcgctactcaggttgcaactccggagggaagacgctgggacttccagcttgataggcggggattggaaccaatgaaagaggtctgctgtgtatgctgcagccaataatagcggccgaaggaagtgacgtttgcggaagtaaggcttccgtcggaaaagctcgataattacccagcctaaccatttctcaggtgcttgcgaggtgatcagaaggcaaagatgtcggagcgaaaagtattaaacgtaagtgttgggcgactggggcttttcaatcggagcaggacatcccggaactccgggagagggaggagcttcctgagatctcttctttggaacccttctttcccagcggccttccgcgagatggggcttcccagactcctccctagactcctccccatcgccttccgtcgggggggtgggccttcgctaagtctcccttctgggctggggtgtagttagtcacctgcggggcgtggcttgggcttttacccaatcaccaccagatagggttttttttctgggggcggggcttccttaaatgctggcggccgtgttttgccctcttcttgaggggcgtggctctgagaagccccgccccacttggggactgtaaccaatcgtgtactttgggtggggtggggtggggtggcgcgtgtgtgtgtgtgtgtgtgtgtgtgtgtgtgtgtgtgtgtgtgtgtgtgtgtgtgtgtgtgtgtgtgtgtgtgtgtgtgtgtgtgtgtgtgtgtgtgtgtgtgtgtgtgtgtgtgttttgttttttttactggggtctggtcatgcagataacctctgccttacagtggccaagattttactggggtctggtcatgcagataacctctgcctgacagtggccaagattccagactcccagaagaaaagcagaggttcagtataaactatactgttggcacacttctgttttttggttttttgagatggagttttgcgcttgcttcccaggctggagtgcagtggcacgttcttggctcactgcagcttctgcctcctgggttcaagcgattctcctgcctcagcctcctgagtagctgggactgcaggcgcccgccaccatgcctggttaattttttttgtattttagtagagatgagatttcaccatgttgcccagggtggttttgaactcttgatctcaggcattccacccacctcatactcccaaagtgctggaattacaggcgtgagccaccgcgcccggccccacgcaggtctttctaggagagcagtctcaggcttgctgtaggaactcctgggaaacaggagccctgggatacaaagggagtgtgagtatggattatgacagatacctccactgcaccactggaaaataaagcactttgtgtttggagcacctactgggtgccagacactgcaaagagcactttatcccccttgcctcaaggaatgcgtgcaaagactcttggagacagaggacagtgtgcgcatttcacagaggagtaaactgagccctgcaggtttcagctcctcaggattcagatccagggagatgactctgtaggaaacggatgtagtatcgtgattgggaggctgagctaacagagtcctggtttaccctctacagaattgctggggagttgggactcctcggggaactcggtctcctgcctgaacaacagaagtgctaagcaaagcttaacctctacaaagggcagggcatgatggctcacgtgtgtaataccagctctttgggaggccaaggcaggtggatcacctgaggtcaggagttcgagactagcctggccaacatggtgaaaccccatctctactaaaaatacaaaaattagcggggagtggtggtgggcgcctgtaatcccagctactgtagaggctgaggcaggagaatcgcttgaacccaggaggcggaggttgcagtgagccaagatcgcgccactggactccagcctgggcaacaagagcaaaactccgtctcagaacaaaaacaaaaacaaaccctggctttttagagcttcccgtgtagacagcatttcatgtgtattgtcatgactggtatttaggagaattaaatgcgtcctgtataactccactaggagagagtcaggaagcttgtgcctggcctccctctgactgtactgagtcctgcgagtcctccctgcctgtcgcggaacctggggtgggcttggggacccccgacacagctccccagagccccttccctctgccatgtcctgcccctgcttctgaaaataactcccccaacgtttccttcctcccctgcagaaatactacccgccggactttgacccatcaaagatccccaaactcaagctccccaaagaccggcagtacgtggtgcggctgatggcccccttcaacatgaggtgagcaccccctgcgtgaccccacacaccagtcatggctgaaggacgcagtgcctggcatccacagaggtgactcgtccggtgttaagaccagatcactggtcttagacattgtcctggctcagacattgaccattccaaccctccttcgcctcaccacttgggattaagctttggatcttttagagccctccagccagtgcctgccttgagatcatggtggttagtaaacgtgtgtgcagagaggataggacgccacagagatgcagccccatagatatatttcagctcctccaacagccaagctcgttcctaccccagggcctttgcacacactgctgcccctgcttggaactctctccctctactttctttctttctttttttttttttgttgagacagagtcttgccgtgttgcccaggctggagtgcagtggcgtgatctcagctcactgcaacctccacctcctggcttcaagcgattctcctgcctcagcctcccaagtagctgggattacaggcgtgcaccaccacgcccggctaatttttgtattttcagtagagttggtgttttaccatgttggccaagctggtctcgaactcctgacctcaggtgatctgccctccttggcctcccaaagtgctgggattgcaggcgtgagctgccgcacctggccttctccttctacttacacatggcaggctcctcttgtctgccataggtcatggctccaatctcacccctccgggaggcctccatcatcccctcacggtgcccagatcttgccttttgtagcacttcagaattactgtatttcaccaactctcaaccccataccttttcatgctctagcatatctgaaatcacgcacctaacgaggaaagagacatctgggtcagtgaaattcggttcatgcccatgtgttgttggcctgtctactcctccccctcattcattcatttattcattcaacactcatttattgggcacctgctgtgtgccagggtctgtgccgagcgccaggaacaaagtccctggcctcatggagcccacagtctaatgggaagtggagaatagtggtagtcaggcaggtgcacgggcccccgaagtcaggcaggagagagcccctggggcagtggcgcaggagggagggctataggtagctggggtacggtgacatcaggcaaaatactggtggcgctgaggtctgaggatgaagggtgtcgccggccatgagactgtaggagcagaggccttgagctgggactgagctgggggtgtttgcaggatcagacaggaggcgggcgtgctgggctggggagcagagcccggagtaggaggggaagaggggggtggggcagcatttttctgtgtggcatctttcctcctggagggtggggtgccccgtaagcacaaagattgcttctgggagtgcatgacaggcaggcctcacctactcagggggcttcccaagcaggcgacccttggactgagccccaggaagatatgaatgagaacacgaagttctcaggtagaggaaatttggacacagggtggggcagcctgcctcttgaaggagggagctccccgttgctggaggcaagcaagcagtgatcttgcaggatgccgcagggacagcctgccagtgggagccagcgtcccaagacagctcacatccctacatgctgccccgcaggtgtaagacgtgcggagaatacatctacaaggggaagaaattcaatgctcggaaggagacggtgcagaacgaggtctacctgggcctgcccatcttccgcttttacatcaagtgcacgcgctgcctggcagagatcaccttcaaggtaggtgagacggccggccaggccggtccctctcccccagcacacctcagatcagggcgggccctggggttccttaactccaatcctctccatccagggaatctcatttcagtttatccccaagaaacagacaacagtttgggggagatgttcatggcagcattctaaataaaggcaaaaagacagaagcaacctagatagataataataagggatgagaagaacaaattagcatgcaggctgggcatggctcacacctgtactcccagcactttgggcggccaaggcgggcagatcacctgaggtcagaagttcaagaccaccctagccaacatggcgaaatgccatgtctactaaaaatacaaaaattactgggcatggtggcggactataatcccagttactcgagaggctaaggcaggagaatcacttgaagctgggaggcagaggttgcagtgagcgaagattgcaccgctatactccagtctgggtgacagagcaagactccaactaaaaaaaaaaaaaaaaaaagccaggcacagtggctcatgcctgtaattccagcaggttgggaggccaaggcaggaaagagagcccctgaggtcaggagtttgagaccagcctggccaacatggtgaaaccccgtctctactaaaaatacaaaagtgagccaggcgtggtggctcatgcctgtaatctcaggtacttgggagaccaaagcaggagaatcgcttgaacccgagagggagaggttgcagtgagccaacattgcgccattgcactccagcctgagcaacgaaatgaaactctgtctcaaaaagaaaaaaaaaagtagcgtgcaatggaatattacacagccaataaaaattgcaatttgacttttatttgttaccttgagaatttaaggaaagactgaagataacttaaaattttctcttcctatgcttaagtactctttgaatacttttttgccataagctttttttctttgattaaaaaaacattttgggctgggcgcagtggctcacagctataatcagcactttgggaggccaaggcaagtggatcagttgaggtcaggagttcgagaccagcctggacaacatgatgaaaccccaactctactaaaaaaaaatacaaaaataggccgggcgcagtggctcacgcctctaatcccagtactttgggaggctgaggcaggcggatcatgaggtcaggagatcgagaccatcctggctaacacagtgaaaccccgtctctactaaaaaaaaagcagaaaaaaattagccaggcgtggtggcgggtgcctgtagtcccagctactcgggaggctgagacaagagaatggcgtgaacccaggaggcggagcttgcagtgagctgagatcgcgccactgcactccagcctgggcgacagagcgagactccgtctcaaaaataaataaataaattaataataataataatattttggctgggtgcagtggctcacgcctgtaatcccaacactttgagaggtcaagggagaaggatcgcttaaatccaggaattcaagaccagcttgggcaacatagtgagatcccgtcagtacaaaaaaatataaaaattagctgggcatgatggcatgcgcctatagtcctagctacttgggaggctgaggcaggagaatcaattgagtctgggaggccaaggctgcagtgagccatgatttcactgctatactccagcctgagtgacagagtgagaccctgtctgcaaaaaaacaaacaaaaactttttttgaaatacctgaagatttacagaaaagttccaaagatagtacagataattctcacctaccccctcaccaacttccccgaatattagcatcttatataaccagggtacatctgtcacagtaagatactaagggtggggccaggcatggtggcttactcccagcgctttgagaaggcaaggcaggaggattgctggggaccagaagttcaagactagcctgggcaacatagtgagaccctgtccgtgtctacacacacacacacacacacacacacacacacacacacaaattttaattaaaaaaagaaactaaaggtggaatgttaccattaacattgtaggctgtggctgggtgcagtggctcatgcctgtaatcccggcactttggaggccaaagcaggaggatcggttgagtccaagagttagagaccagcctgggcaacatggcgaaaccctgtctctaccaaaaagaaatttaaaaattagccaggtgtgatggtgcatacctgtagtcccagctactcggcaggctaaggtgagaggattgcttgaacccgggaggctgaggttgcagtgagccatgatcctgccgctgcactccggcctgggcaacagcacgagaccctgtccccaaaaaaataaaaaacatagtgttactattagcatttagaccaaaggtagatttcagtttttctgctaatgtcacttttctgttccagtgtgtaatttaagataccagggtgtatttagcctctctattcaataaacaaaaacaggggcatgctgtatacatatttgtacatgtgatttataatcaaagaaaaggtgttaataaatacaaagggcagaaatcacaacatgtgcagaaccttggagatttttttttttttttgagacagggtctcactttgtagccaaggctggagtacagtggtgtgatctcagcctcccaggttcatgtgattctcatgcctcagcctccagagtagctgggattacaggcatgcaccaccttgccctgcctaattttttgtatttttagtagagacagggtttctccatgttggccaggctggtcttgaatacctgacctccagtgatccacctgcctcattggagagtttgtttgcagtcatgttaagggtagggagtggaggatgcagggaggcagtgggcagatgagaagagtcttaaagtccatgccagggagttgggcatttttgcccatggagatgggaggagcactaggaagaaatctcaccagtcaaagcaataagacaagaaaaagagaaggtagtagaaccagtaaaaatcagagagaaggggccctgatctgctggtggtactttagaagattctagtgcctggggatgtaggagctgatgtctgtctatcctccctgcagacagaccctgaaaacacagactacaccatggagcatggagccacgcggaatttccaggctgagaagctcctggaggaggaggagaagagggtgcagaaggagcgggaggacgaggagctgaacaaccccatgaaggtgagtcgggggccatgtaggtgttcatgggcgctgtgtgtgtgggtgtgtgtgtgtgccaatggttgtgcccttcctgcctcaggtccccaaggaaggaagatggggtggggggcgtggttggtaaaactttaagatgtccccaggaggccaggcatagtggctcatgcctgtaatctcagcactttgggaggctgaggcgggaggatcacttgaggtcaggagtcctagaccagcctggccaatgtggcgaaaccctgttcctactaaaaattttaaaacttaacactgggcgcagtggctcacacctgtaatcccagcacttttggaggccgaagtgggtgggtcacgaggtcaggagtttgagaccagcctgaccaacatggtgaaaccccgtctctactaaaaatacaaaaattagccaggcatggtggcacgcttctggaattacagctactcaggaggctgaggcaggagaatcgcttgaaccggggaggcagatgttgcaggaagccgagatggcgccactgcactccagcctgggtgacagagtgagattctgtctccaaaaaaaaaaaaaaaaaattagtcaagcatggtggcgcatgcctgtaatctcagctacttgggaggctgaggcaggagaattgcatgaacccgggaggcagaggttgcagtgagccgagatcaaaccactgcactccagcctgggcagcaaagcaagactctgtctcaaaaaaaataaataaataaaagaaattatgttcacttccaataggacaattttgtattttctcagaaatattaaaaggagccatgcatggtggcttgaacctgtagtcccagctactttaggggttgagacaggaggatcacttgagtctaggagtcaaagaccagcctgggcaacatagtgagactctgtctctataaaacattaaaaaattagccaggtgcttgccaggcgtggtggctcacacctgtaatcgcagcactttgggaggccaaggcaggtggatcacaaggtcaggagttcaagaccagcctggccaagagggtgaaaccccgtctctactaaaaatacaaaaaattagccgggcatggtggcagacacctgtaatcccagctactcgggaggctgaggcagagaattgcttgaactcaggaggcagaggctgcagtgagctgagatcatgccactgcactccagcctgggtgacagagcaagattctgtgtcaaaaaaaaaaaaaaaaaaaaaatcagccaagtgctttgggaggctgaggcaggcggatcacctgaggtcaggagttcaagaccagcttggccaacacggcgaaaccctgtctctactaaaaatacaaaaattaaccaggcgtggtggcacgcgcctataatccaagctactcaggaggctgaggcaggagaattgcttgaacccaggaggcggaggttgcagtgagccaagatcgcgccattgcacttcagcctgggcaacaagagtaaaactctgtctcaacaacaacaacaaaaattaggcaggtgtactggtgtgcacctgtggtcccacctactagggaggctgaggcgggaggatcacttgagcccaggaagttgaggctgcagttagctatgatcacatcactgcactccagcctggaagacagcaagactgtcgcaaaaaaaaaaaaatatatatatatatatatatatatatgtacacacacatatacatatatatacatacacatatatatataaaacagatttttaaatgactgtgttccctgctgtcccctcctgcttccatatttcccatccattcttatctattcctggacccacccacccctgccaaatgtgagttttctgagcaagccacatcagaccagatacaacattttccatggccatgcagagcaacagggagggaaatgagccttggcaagggtttggtgtgtgcctgggcctgtcgcactgctgtctgtgtgtgaatttagttacctccacactgacagcaaggggctcttaccctggtgttagtcagctattgctacataacaggttatcccaaaacttagtgactgaaaacaacaaacatttattatcccacagtttttgagagtcaggcatccagaagcagctgagctggatggttgtggcttgggggctcccatgaggttgcagtcaaggtgttggccagggcagtatcatctgaaggctggactggggctggaggagccactcgcaaactggctccctctactggctgttggctgtcagcctcagttcctcgctgtgtggggagctgcttgagcaacctcacaacatggcagctgcgtaccccagagcatgtgacccaagagtgagagcaaggaggaaggcctgtgcttttacatcctagtctcagaagttacgtgccattatttctgtcatattccattagagcaagtagcttgtccagcccctgctcaaggggaggggagtcacctccaccccttaaatggaggagcatcagagagtttgtggacatacttttaaactgtcagaattgccatttttccaaagggtaaatacaacaaggtcacagcactgggaagcagccaggcaggattcactcccaacctgcctggctccaaagccacttctcagggacccgtggccaccagactcgcctccctcagcctcagtttccgtttctgtaaaatgggggttgtgaggattaaatgagatggcatatggaaacctcttagcccagggcccggtgtacagtaggtgctcaggttgtcttttacaatttttccttaatattattatttttgagatagagtctcgctctgtcacccaagctggaatgcattggcacgatctgagctcagtcaacctctgcctcctgggttcaagtgattctcctgcctcagcctcccaagtagctgggattacaggtgtgtgccaccacgcctggataatttttgtatttttattatttatttatttttttgagatggagtctcactctgtcacccaggttggagtccagtggtgcaatcttggttcactgcaacctctgcctcccgggttcaagcaattctcctgcctcagcctcccaagtagctgggattacaggcacatgccactacgcccagctactttttgtatttttagtagagatggggtttcgtcatgttggccaggctggtcttgaactcctgacctcaagtgatctgtctgcctcggcctcccaaagtgctgggattacaggcgtgacccataacacccagcctgtatttttagtagagacagggtttcaccatgttggccaggctggtctcgaactcctgatctcaggtgatccgcccgctccggcctcccaaaatgctgggattacagacgtgagccactgtgcctggccaaatttttccttattattcttactgaaagatggcaccaggccagaaatccaggccacctgggtccagagccagcctctttccaccccaccctgccccagggctcagatcccggctccaccactgctcagccccatgtggtcactttccctccccagacctgagtgttctcacctgtgaaatggacacagcgctgggcatgggcagggggttccctgagcaggatggaaacgtgggggtaggggttcctcccgtggcccgcagtggcccccgaggccagacagggtttgccccgtggtgcgatccccatgcactcagccccgccgccccgcgcccgccaggtgctggagaaccggaccaaggactccaagctggagatggaggtgctggagaacctccaggagctgaaagacctgaaccagcggcaggcgcacgtggacttcgaggctatgctgaggcagcaccgcctgtcggaggaggagcggcggaggcagcagcaggaggaggacgagcaggagaccgcgtgagtcagggccggcccaacccagccccacctcgcagcctctgccccggcaggcgctgcctctgccccagaccctttccccgctctctggagtgtcgcctttgcaaggacccctttcccaccgcccatctcactttctcccttgtggcgtctctcgagggggtcccaggccactgccgggcacggtgacttagcacgtggtcgcccgcatggctgcggtttgtcacagcgagaggacacagcagattcagcaaaggggaaaggcatgtgtggtgtgtcgggggccaggccttccagatcctctcctggtggagcttcgcaggacgcgcctcatcccctagcaccagcctggaggactcgagaaaggcgccatcactagggaagctcctagagacccagcgtggggttcctatggggcctggtcccacagcccccgctgcctcacccatgccgggattccagactccagaggaaagcaggggtcacgcataaaccatggtgtttgcaggaacagctgaagccccagagcccgtcccatccatgagggtgggaggcccccagcacaggctcccggacacccaccaagggacgccctcaccagccgccttctgaggacacagcctcaggcctcctgggtgaacacttttctttttttttttttttttttttttttttttgagacggagtctccctctgctgcccaggctggagggcagtggcgccatctcgctcactgcaagctccgcctcccgggttcatgccattctgcctcagcctcccgagtagctgggattagaggcatccgccaccaagcccggctaattttttgtaatttttagtagagatggggtttcaccgtgttagccaggatggtctcgatctcctgacctcgtgatccgcccgcctcggcctcccaaagtgctgggattgcaggcgtgagccaccgcgcccggacgacgcttttctttttctttgagacggggttttgctctgccgcccaggctggagtgcagtagtgcagtcatagctcactgtagcctccatctcccgggctcaagcgttcctcctgcctcagccttctgggtagctgggaccacagggacacatcaccatgcccagctaattgtttttatttctgtagagacaggacctcgctatgttggacaggctggttttgaactcctggcctcaagcgatcctcccaccttagtctcctgaagtgctggatgacacgtgtgagcccctgtggttggctggtgaatgcctttgacgccgaccacctctgagcccgcgtgctgatcccctcctttcctggtgcctcatctcccctccctcctttagaatctgagctgtaaggacagggacgtggtggcctctcctgtgtccccagggcttccagcaggtaggttctggtaggttccacgtcagtgcctgatgggtgtgcagagcagcgataccgtgcagaacagtgttgggagcctgcgttcatcctgcaccttccgggtgccgggcgtggctgtaacctcactacccacacagccctgggggtcagtgtgatcttcatcatggaggggactgaggtccagggaggtccaggcatgagccccaccaaggttaccctccaggctccatccagacaggctggttccggcatccaggcacttaaccacaccactgccctcggtggacacggaaaagttaatgtaaaaaagtagaaggggccgggcgcagggtctcctgcctgccatcctgcactgtgggaggctgaggcgggcggatcacctgaggtcagcagttcgagaccagcctggccaacatggcgaaaccccatctgtactaaaaatacaaaaacaaattagctgggcgtggtggcagatgcctgtaattccagctgctccagaggctgagacaggagaattgcctgaacccgggaggcagaggttatagtgagccgagatggtgccactgaactccagcctgggcgacagagcaagattcctcctaaaaaaaatgaaaattaaaaagtagactaggtgcggtcggtggctcacgcccgtaatcccagcactttgggaggctgaagtgggcgtatcacctgaggtcaggagttcgagaccagcctggccaagatggtgaaaccccgtctctactaaaactacagaaattagctggacatggtggtatgtgcctgtagtcctagctaacatttttaatttttttagagacggggtctcgctatgttgcccaggctggtctctaacccctggctcaagcgatcctcccgtctcagcgtcccaaagagctgggatgacaggcatgagccactgcatctggcccctttaatctgttttatgtttaaatagaggaagtggtaaccactgggttaaggaagtcccaatgggtgctctgccctcacggagctcactgtgtggggagggagagggacaaggagaccaatacccaggacaacatccatctgggtgagagagaagccaggatgcgtgagcttgaattatgaggatgagcttctcagaggaagagcgtcttgcattgggtattgaaggtcgagtaggagttcaccaagcgagtgcttggcaaaggggtcatcccaggtaaggggatgtaggcccctgatttttaaaatcctttttgcagagatgcggtcttgctgtgttgcccaggctggtctcatgctcctggccttaagcatttctcctgccttggcctctaaaggcacagggattacagacatcagccaccatgtctggccccaagacatttttctaaaagacattttctttgaagctatatcccctgattagagttctcacactgtggttctcacataaaccactcccagaattagagaccggcctggccaagatggcgaaaccccgcctctactaaaaatacaaaaattagctggacacggtggtgcgtgcctgtagtcctagctgctcggtaggctgaggctggagaatcgcttgaacccaggaggcggaggttgcagtgagccaagatcacgccactgcactccagcctggacaacaaagactccatctcaaaaaagaaaaaaaaaatacaaaaattagccgggtgtggtggcaggcacctgtaatcccaggtacttgggaagctgaggcaggagaatcgcttcaacctgggaggtgggggttgcagtgagccaagattgcgccactgcactccagcctgggcaacagagcgagactctgtctcaaaaataaaatgaaataaaatttaataaggcataggaacacgcctgtggacccagctactcaggaagctgagtggggaggatcgcttgagcccaggaggttgaggttgcagtgagctgtgattgtgccacttcaccctccctgagtgacagagtgagaccttgtctcttaaaaaaaaaaagtaatctgtgctccccctactccctcccacccctgctcactgagggcaggaagaggtctccaggcacccaggcccctcgccaccccagcaggtacatcccaggcactgttccccaaacagagcacgtccaagttcccatcttccatcccacagggccctgttggaggaagccagaaagcgaagactgctggaggactccgactcagaggatgaggctgctccctcgcccctgcagccagcccttcggcccaaccccaccgccatcctggatgaggtaagtggggtgcctgagtcctgggggctcccaggtgaactagggacaactgaagccaggggtcagcttgactttttcttttgttttttgtttttgttttttgagacggagtctcgctctgtcgcctaggctggagtgcagtggcacgatcttggctcactgcaacctctgcctcccaggttcaagcgattctcctgcctcagcctcccgagtagctgggactacaggcacgcgccaccaagcccagctaattttttgtatttttagtagagatggggtttcaccatgttgggaaggatggtctcaatctcttcacctcgtgatccgcccgcctaggcctcccaaagtgctgggattacaggcgtgagccaccatgcccgaccagaacttgactttttcttaaaaggccagtctgcaccctaactcctccaccctgtggctgtagcccaaaacacccatgatcaggtgtaaataagtgggtgttgcctggtgccaataaatctttatttataggcggggtgcagtggctcatgcctgtaatcccagcattttgggaggccaaggcaggaggatcgcttgaggccgggagtttgagaccagcctgggcaacaaagtgagaccccttctttacaaaattacaaaaattagtcatgggtggtggtgcatgtctgtggtcccagctgtttgagagactgaggcaggaggaccgcttgagcccagaaggtcaaggctgcagtgagctgcatcagtatgaccgaactccagcctgagcaagagtgagaccctgtctaaaataaacaaataaaaattaaggctgagtgcagtggctcacgcttgtaatcccagctactcagaaggctgaggcaggagaatcgcttgaacccgggaggcggaggttgcagcgagccgagatcgtgccactgcaccccagcctgggtgacagaatgagactctgtctcaaaaaaaaaaaaaaaaaaacttaatttactaaaactggtggcaggcctatgggtctgtaattcgccaacccctgtttaagctgccgaaagaagagaatgtaaagaaagaacatagaaatttatttctcagtcataacagccctgggctgacagtctaggacttcgggcagctctgctccttggaaccattcagggactcagcctccttccttctggagcacggcttcctgcgctgtggccacagctggctcagagcaccttcagggtccggctgtgggaaggcaaaaagtgtgtggaggaccacgcagcctcagatgcggcccacctcagttcttctctcatgccagaggccacagcatagtcacaaggccccatctggtggcgaaggaaactgtgagatgcatcctccagctggtccgtgcctggctgtgctgccaactagaacgaagggaggccgggcaccgtggctcaaagtgctgtaatcccagcactttgggaggccgaggcaggcggatcatctgaggtcaggagttcgagaccagcctggccaacatggagaaaccctgtctctactaaaaatacaaaaattagctggacatggcggtgcctgcctgtaatcccagttactcgggaggctgaggcaggagaatcacttgaacctgggaggcagaggttgcagtgagctgagattgtgccattgccctccagcctgggcaacagagtgagactctatctcaaaaaaaaaaaaaaaaaaaaggaggaaggagttttggtggatgaccagcattttccaccacagctgactcatccaaggtggcctcagccactctggtttgttcattgaagaaggtggtaaaagtaggggctcataaaccaataacacagacacacagaaacgattgttctcggccgggcgcggtggctcacacctgtaatcccagcactttgggaggccaaggcgggtggatcacgaggtcaggagatcgagatcatcctatctaacacggtgaaaccccatctctgctaaaaatacaaaaaattagccgggcgtggtggcgggcgcctgtagtcccagctactcaggaggctgagacaggagaatggcgtgaacccaggaggtggagcttgcagtgagccgagattgtgccactgcactccagcctgggcgacagagcgagactctgtctcaaaaaaaaaaaaaaaaaaaaaaaaagaaacgattgttctttcttccttttttgtttgtttgtttgacacagggtcttactctgttgcccaggctggagtgcagtaatgcagtcccagctcactgcagcctgaacctcctaggctcaagcaatcctcccacctcagtctcctgagcagctgggaccacaggcacgcaccaccacgcctggctaatttttcttttctttctttctttttttttttttagacagtttcactcttgttgcccaggctggagtgcagtggtgtgatcttggctcactgcaaccttcgccccccgggttcaagcgattctactgcctcagcctcccaagtagctgggattacaggcgcctgccaccatgcccggctaatttttgtatttttagtagagatggcgtttcaccatgttggccaggctgatctagaactcctgacctcaggtgattcacctgactcggccgcccaaagtgctgggattacaggcgtgagccactgtgcctggcccctaatttttcaaattctttttgcagagatgcggtcttgctgtgttgcccaggctggtctcacgcacctggcctcaagcagttctcccgccaaggcacagggattacagacatcagccaccatgtctggccccaagacatttttctaaaagacattttctttgaagctgtgtcctctgattagagttctcacactgtggttctcacataaaccactcccagaattcattgtctacaacttcctctcttcttttcttttttttttgaatgaatcaacagagtaaaggtactttgaaagcagtccaaccttttttgatttactccctcagtcttgtgcctctacctgatttgatagcaggtgttttatttggttttaacgtgattcaccttcatcaagacttttcaaaccttcaccctaacttttataggaaggaatatctccacacttgcgttttcttggtttattttatttttattttagagatgaggtcttgctctgtcacccaggctggagtgcagtgacgcgatcacagctcgctgcagcctccaactcctgggctcaaatgatcctcccacctcagcctctcaagtagctgggacccacaagtgtgtagtgtgtgccaccacagccagctaatttttaattttcttttctttttttttttttagaggcgagtctgtatgttgtctaggctggtctcaaactcctatcctcaagcagtcctcccgccttggcctcccaatccttagtttagtttaatgatgatgagtaccacctgtagaaacaggtttgggaactaacctaggtaacttttttttttttgagacggtcttgttctttcgcccaggctggagtgcagtggcacggtctcggctcactgcaacctccggctcccagcctgtagcaattgtcctgccttagcctcctgagtagctgggattacaggcgtgtgctaccacacctggctaggttttgtattttctttttattaataaagagacggggtttcaccatgttgaccaggctggtctcgaactcttgacctcaagtggtccacccgcctcggcctcccaaagtgttgggattacaggtgtgtgcctctgtgcctggccatctgtgccttttgacttcttttcctcattttgacatcagcccagagctacgacatttttttttttttttttcgagacggcgtctcgccctgtcacccaggctggagtgcagtggcacgatctcggctcactgcaacctctgcctcccaggttcaagcgattctcctgcctcagtctcccgagtagctgggattacaggcgtgtgccaccaagcctggctaatttcttgtatttatagtagagacgggctttcaccgtgttagccaggatggtctctatctgacctcgtgatccacctgccttggcctcccaaagtgccgggattagaagcatgagccactgcgcccggcccagagccacaactttaaggaggcctctccaccaccttagcagtggccgcccctcacaccgtcagcttggcactcaaggtctctgcccattctccatcccacctagcctgccctggcacttcctgaatcacactgtggcttctcatcacgcctttacccatgccattccccttacctgggatgccccctttgccaagcactcgcttggtgaactcctactcgcccttcaatacccaatgcaagacgcccttcctctgagaagctcatcctcacaattcaagctcacgcaccctggcttctctctcacccagatggatgttatcctgggtattggtctccttgtccctctccctccccacacggtgagctccgtgagggcagagcacccattgggacttccttaacccagtggttaccacttcctctatttaaacataaaacagattgaagaggctagatgcagtggctcacgcctgtcatcccagctctttgggacgctgagacgggaggatcgcttgagccaggagtttgagaccagcctgggcaacatagcgagatcccgtctctacaaaaattaaaaatgttagcctgccatggtggcgtgcacctgcaggaggctgaggcaggagaatcgcttgagcccaggagttcgaggctgcagtgagctatgattgcaccactgcactccagcctgggcaatagagtgagaccttccccccaaaaaaatttttttaataatatagattaaagggtcccttctgttgcagttaaggagctggaggccttttctacctgcccctaactctttctcaaggcggcttcctccattttcactcgttctctcaagtacattgagcacctccttgtgccaggaactgtttgtggcaccgcagagccagcagtggggaagacaggagctcacggcagagttggggagagagttataacagccagcagagggcactgtgagcgtggacatgcagcctgcatgtgagcttgaaccatgatgggcttctcagaggaggggtgtcttgtgttgggtattgaagggtgagtaggagttcaccaagcgagtgcatggaaaagggggcatccctggtgaagggaatagcatgggtaaaggcgtggagatgagaagccatggtgtgactcaggaagtgccagaccaggctatgtgggatggagaatgggcagaggccttgagtgccaagcctagggcagtggggagccatagaggagtttagagcagaggaggaatgtggtcagtgcagcagtggaagagtgggcatggggcagtgagcaggggttgtggcgaggggccagactgggccctggatccgggccagacccccacatgtgtccccatcacctgcaggccccaaagcccaagaggaaggtggaggtctgggagcagagcgttggcagcctgggcagccggcccccgctgtcgaggctggtcgtggtgaagaaggcaaaggccgacccggactgcagcaacgggcagcctcaggcggcccccaccccaggtaaggtcacagagttcccagagccgggcgcggtttctatagtggcctgtaggtggcagcagctccctttgcagttacagagacttcatggggtgggtgggggcggcctgcgacccccacaggaccaattagtggagtgagcagagaaggcaggcggcttctttttttcttttttcttttttctttttttttttttgagacagagtcttgctctgttgcccaggctggagtgcagtggtgccatctcggctcaccgcaacctccgcctccctggtttgagcagttctctgcctcagcctcccaagtagctgggactacagcaccacgcccggctaaatttttgtattattagtagaggtgggatttctccatgttggtcaggctggtctggaactcccgacctcaggtgatccactcacctcggcctcccaaaatgctgggattacaggcatgagccaccgcgcccggcctgtttttgtcttttagttgccttagtatgatgtttcctaaggcgattaagtccacagtgactggactgtgaactttgcgccatttccattcttggcagcgcacgttgcctgcctgggcaaggtttgcattggccattgttcagaagcggagctgttgagtcccgggtgtgcagatgtaaatctgcaatgggtcccatcaggtgccatccagaaaggccaggccattcacatgctgtcacctctggaccttgcaaacctgcagaggtggccggccccgtgccttgtccctggcctgtctgctgtggagctgagatgagctaactctcgctctcccaccaggagccccgcagaacaggaaggaggccaaccctacacccctgacgcctggcgcgtcctccctgagccaactgggtgcatacctggacagtgacgacagcaacggcagcaactgagccctcccaggaccccctcacggggtcaaagtcacacgtccagcttcagccacattgaggccagcattgctggtggtcagggcaggaggccttggcgtgactggaggccggacagacaagcgccagcgtgctccaacacatagggccaccaggggcctcagccccaggaggtcccttctctgtgccctcaccagcctctcaacacctcggggacccctgctgctcctgcccccacctgtcactgtgcttagggctgcaacatccctggagcagcttccaacactacttcagggtggcagtgtttggggcactgggcgagcctgccggcctctagatggcctcatctcttccttccacaaactgtctagaaccaataaaaggaaacctgccaaccgcctgggccccttctctctcccagagtctgatgaggaggtcccaggacctcctctgttagcacaattcgagggtcattccacagaggtttgtttgtgtcttgagacaggatctcactctgttgcccaggctggagtgcggtagcgtattcttgactcactgcagccttgaacttccgagctcaggtgatcctcccacctcagcctcgcgagtcgctgagacctcaggtggatgccaccattcctggctaactttttgtatatttagtagagactgggtttcatcatgttgcccaggctgatcttgaactcatgggctcaagtgatcctcctgcctcagcctcacaaagtgctggggtcacaggcataagccactgtaacaggcatgagcccagatatttatatttagttgtcgcctgagtgtgcatctgggctctttttgttttctcttctttttttttttctttctttaccttttttttttttttttttttttggagacgacgtctcgctcttgtcccccaggctggagtgcgatggcgcgatcttggctcactgcaacctccgcctcccgggttcaagcgattctcctgcctcagcctccagagtagctgggattacaggcgcccgccaccacgcctggcttaatttttgtatttttagtagagacagggtttcaccatgttggccaggctggtcttgaactcctgacctcaggtgatctgcctgcctcagcctcccaaagtgctaagattacaggcctgagccattgtgccctgcctgtacaatctttttgtttgtttgtttgagacagagtctccctctgttgcccaggctagagtgcagtggtgtgatcttggctcactgcaacctccacctcccaggttcaagcaattctctgcctcagcctccccagcagctgggattacaggtgcctgccaccacgcccagctaatttttgtgtttttagtagagacgggtctcaccatcttggccaggctggtcttgaactcctgacctcaggtgatctgactgcctcagcctcccaaagtgcagggattacaggcgtgagacactgcaccagcctggaatcttttaaagtgaacaatatgaaccttctttgagtaggcagttccatttctggctgtctgttctaagaggtatttgcccacattcataaggaaacacccacgaggaggtttgtcgtgacactgtgtttagcagcaacattatggggaacgaacccaatgtccccagtaggtgaaggctgaactctggcataaataatggaattccagccgggtgtggtggctcaggcctggaatcccagctacttgggaggctgaggtgggaggatcacttgagcccgggagattgaggctgcagtgaggtgtaactgtaccactgcactccagccttggtgagagaccaagatcctgcctgaaaaagggggaggggggtggggagctaggcccaggacaggaactgtggcatgttcctgtaatcccaggactttggggggctgaggcaggagggttggttgaagacaggaggtcgagtccagactgggcaacatggccagaccgtttctcaatttgtctttttttaaagaaaggtggggcacggtggctcacgcatgtaatcccagcactttgggaggccacggcgggcagatcacctgaggtcaggagttcaagaccagcctggccaacatggtgagactcccaccacccccactaaaaataaaaaaattagtcagatgtggtggcgggcacctgtaatcccagctaattggtaggctgaggcaggaggatcacttgaacctggaaggtggaggttgcagtgagctgagatcatgccactgcactccagcctgggcaacagagtgagattccatctcaaaaaataattaattaaaaaaaaagatgctacaatttgccttcaaaggggctgcgctctacatactcaacaaggatgggactcactggctttatgagtagaaagctctggctgggaagttcccctcctcggcgggggcagcagaaggagttggcagagggaaggaaggaacctgtgtttatcaaatgttccctgagcatttggcagaaacaaagttgaactcccacttccaacacccgttcttattttaattttaattttttttttttttgagacagcatctcactctatcacccccgctggagtgcagtggcaggatctcggctcactgcaacctccgcctcccgggttcaagcgattctcctgcctcagcctccagagtagctgggatgacaggcacgcgccaccctgcctggcttaatttttgtatttttagtagagatggggttttgccatgttgccaggctggtctcgaactcctgacctcaagtgattcgcccgcctcagctcccaaactgctgggattacaggcgtgagctaccgcacccggcccccaaaaaacttttatgtattatatatttttacaataacatataaataatgtataccgaaggtggtgaaaataaagcaggtgagtgtgttctaaggagatgcagaggggatgccttgggaacgtgtttattgcccatctctccctctgtttgttttctggtgctgcataacaaattataccaaaactgaacaacttaaaaacaacatagagctgggtgtggtttcattgggtctcccgctttaaggtttagcaagaatgcaatcaagacagaggccaggctgggcgcagtggctcatggctgtaatcccaccactttcacaggccgaggcgggcggatcacttgaggtcatgagttcaagaccagcctggccaacatggcaaaaccctgtcactacaaaaaagtacaaaaattagttgggcatggtggtacatgcctgtaattccagctacttgggaggctgagacaggagaatcacttgaacccaggaggcagaggttgcagtgagccaagattgcaccactgcactccagccagggggacagagcgagactcccgtctcaaagaaaaaaaaaaaaaaaagacacaggcccaggctggggtgtcatctgaaggctcaactggggaaggacctgctgccaaacctttgtggttgttgacagaattcagtccctcatggctgttggccagaaaacactctcagtttcttacctacacagaccttgtctgcagcttgtgtctttgtccatttgctgctgctttcacagaacaccacagactgggtaaattataaacagtagaagtttattcgggccgggcgcagcggttcacacctgtaatcccagcactttcagaggctgaggtaggtgtatcacctgaggtcaggagtttgagaccagcctgcccaacatggtgaaactctgtctctactaaaaatacaaaaattagccgggcatggggcaggtgcctgtaatcccagctactccagaggccgaggcaggagaataacttgaacccgggaggcagaggttgcagtgagccaagattatgccattgcactccatccagcttggacaacagagtgagactccatctcaaaaaaattggtgcaccccagcaccccaaaaccagctggcacatcgtgggtgctcgcaaatgggttgagggggcatcaccccattccccaatgaggaaacaggctcagggagccccaggtttcacctcctcccctctcacaccccactctttcatacaccactggaattttatttttatttcttttttttttcccctgagaagctttgttctctcaccctgtgtcctgggggcaattctgctctcagcccccagttctctcctgggggttcccaggactgagggagtagaggggcaggcacagccatgcatcgggctctgtccctcctgaccagcgggggacccctccctgccctgccccacctctcagggccccctaccctcaccctctgaagcctgcccttcccctatccctgccgacagtacccgttccccaccagcccgcgtctgtcatcctgtcttcgggagctgtcagccttcatctgagatctccatcaactcctccggggctgcctggctgctggagcacatcagagggatggggaggaggggcgatgggggccccttctgctggagcccactgccgccccagcctgggcttacaggagaagaggggccatgccatttccccagcttttgccagttccagtgtgaacttggggctccctgagcctgtttccttatctgggaatggggtgacaccacccactcagtccacaaacaccccccgggcacacgctctgttgctgccccatttacaggtaagggagactcctcgacctccagggtgagggagggacagggcctgggtatgaagctccaggctccgaggctacgcctttggtcacccaccccactgcaaccccaagagctgggctgtgcctgcgtgtcagactggagccctggaagggctggatcatgcctcccccatcaggtaggggcccctagaaggaaggctcgcttctcctccagcagactgggaccttgtaagttagttagggccatgcctcctgtgttggactgggcccttgaaatttacaccatacctcccccatcagactggggacgcttgaagtttggactatgcctccctcatcagactggggactcttgaaggcaggcctatgtctcctccattactctgggaccctggaagtcaagactatgtctcctgcattagacaggggaccgttgaaggttgaacctgcctcccccatcagactgaagataggttcacgtctccttcctcagagtgggaacccctcaaggtagggccatatctctcccatcaaatggaagctcctgaagtcagagccgcaactcttccatcagactgggggcttctgtggacaaggccatgcctctgccatcagaccgtgagttaagaaaggcagagctggccaggtgcagtggctcacgcctgtaatcccagcactttgggaggccgaggcgggcggatcacgagatcaggagatcgagaccatcctggctaacacaatgaagccaagattgcgccactgcactccagcttggacgacagagcgaaactctgtctcaaaaaaaaaaaaaaaaaaaagacagagctggctaggcacagtggctcatgcctgtaatcccagcactttgggaggccaaggcgggcggatcacaaggtcaggagttcaacaccagcctggccaacatggtgaaaccccgtctctactaaaagtacaaaacttagccaggcatggtggcatgcacctgtaatcccagctactccagagactgaggcaggagaatcgcttgaaacaggaagcgggaggttgcagtgagccaaggtcatgccactgcactccagcctgggcaacaagagtgaaactccatctcaaaaaaaaaaaaggcagagctggccaggcgcagtggctcacgcctgtcatcccagcactttgggaggccaaggctggcatatcaccggaggtcaggagttcaagaccagcctggccaatgtggtgaaatcctgtctctactaaaaataaaaaattagctaagtgcagtggcacacacctgtagtcccagctacttgggaggctaaggcaggagaatcgcttgaacccaggaggcggaagttgcagtgggccaagattgtgccactgcactctagcctaggcaacagagtgagactctgtctcaaaaaaaaaaaataaagatggctgggtgcagtggctctcacctgtaatcccaaagctttgggagaccgaggcaggaggatcacttgaggccaggaattcaagaccagcctgggcaacattgcaagatcccaattctagaaaaaaagatttttttttttccaagatggagtctcactctattgcccacgctggagtgcagtggcacgatctcggctcactgcaacctctgcctctcaggttcaagcgattctcctatctctgcctcctgagtaggtgggattacaatgtgcctgccaccaagcctggctaatttttgtatttttagtagagacggggtttcaccatgttgggcaggatggtctcgaactcctgacctcaggtgatccacccgactcagcctctgcaagtggcgggattacaggtgtgagccaccacacccagccctctagaagaattttaaaaattaaaaaacacaggcctggccaggtgcggtggctcacgcctgtaatcccagcactttggaaggccgaggcgggtggatcatgaggtcaagagatcgagaccatcctggccaacatggtgaaaccctgtctccactaaaaatacaaaaatcagctgggcgtggtggcacatgcctgtagtcccagttactcgggaggctgaggcaggagaatcacttgaactcgggaggcgggggttgcagtgagctgagatcgtgccattgcactccagcctggtgacagagcaagctccgtctcaaaaaaacaaacaaacaaacaacaacaacaacaaaaaacacaggccccagaatggacgcagcttgaggacatcacgctcagtgagaaacaccagacacagaaggccacaaagtgtgtgatcccatttctatgaaatgtccaggacaggcccatccacagaggcaggaagtggatttgtgtttaccaggagctggggatttggagagatggggagtgacagctaattgggtatgaggtttcttttggaggtgacgaaaatgttcaggaattaggggtgatggtcgcacaaccttgtggacacaggagaaaccactgaattgtacactctaaatgggtgaactgtaggatatgtaagttatgttttttgtttttttgagatggagtctcgctctgttgcccaggctggagtgcagtggctcaatcttggctcactgcaacctctgcctcccgagttcaggtgattctcctgcctcagcctcccgagtagctgggattacaggtgcccgccaccacgcctggctaatttttgtatttttagtagagacggggttttaccatgttggccaggctggtctcgagctcctgacctcaggtcatctgcccacctcagcctcccaaagtgctgggattataggtgtgagtcactgcacccagccaatgtgaattgtatctttaaaaaaaaaaaaagcaacaaggccgtgtatggcagctcactcctgtaatctcagcactttgggggcgccaaggtgggcggatcacgaggtcaggagtttgagagcaccctggccaacatggtggaacaccatctctactaaaaatataaaaattagctgggtgtggtggcgggcgtctgtaatcccagttacttgggaggctgcggcaggagaatcgcttgaacctgggaggcggagcttgcggtgagccgaaattgtgccactgcactttagcctgggcgacagagcaagactcggcctcaaaaaaaaaaagcggccggactcggtggctcacgcctgtaatcccagcactttgggaggctgaggcgggaggatcacaaggtcaggagatcgagaccatcctggctaacagtgaaaccccatctctactaaaaatacaaaaaagtagccgggcatggtggcgggtgcctgtagtcccagctactcgggaggctgaggcaggagaatggtgtgaacccgggaggcggagcttgcagtgagccgagatcgcaccactgcactccaggcccgggcaacaaagtgagactctgcgtaagaaaaaaaaaaaagcaaaaaaaaagccgggttttgtggtatgcacctgtggtcctagctaccaggaggctgagatgggaggatcatttgagcccaggatgttgaatgtgaggctgcagtgagctgtgattgcatctccagcctgggcaacagagcgagagaccctgtctcaaaaaaaaaaaaaaaagggagaaaagaaaaatccaaatctcacaaggttacgtggctgattcaaggtcacaggggaaggtgactggacccctagcctggatctctttctcttctacctaatcctcctgcctctccctgccagcctctccccactcccctccttggggtagggtcggggtgcagccccaggagaagccagctccaaagcacaggaaagtcaaatgccgtttgattccggccccggggcctctaattgctattcctgacacagattgtaattagaaggcccctttcaaatatttatacctcagacatctagttttatccggcagggagacgacttggatttgatgagatctgtcaacagctcatccccgtggcccggaattgccttgcggctgacagaaagcaggacaattacccgctgtgctccctggccgcccccagggacgcagccttgtcgctgatctgaaagggtggggggaagcgggggtggccatgcacttcaggagggaggaaggagttcaacaggtctgtgttgggggacacagccagtgcagggaaggggaggaacagaagggtctagacgcctgcatccttcaggggctttgccttgttggctccaggcctcagttttcccatctggataatggagctcatcgtggagaggagttgcagaaccgattccatgaagagcattttgggaggccgaggccggcagatcacctgaggtcaggagttccagaccagcctggccaatgtggtgaaaccccatctctactaaaaatataaaattatataaaaattagctgggcgtggtggcagtaatcccagctactcaggaggctgaggcaggagaattggttggacctgggaggtggaggtttcagtgagctgagatcgcaacacggcactccagcctggaggacagagcaaggctccgtctcaaaaaaataaaaagagagactccagtgccaccctaggccaggccccacggcgatgtgcaggcagaatcagctgtggagtggctctgaacaagtccctcccatctctgtgcctcggtttccccatccataaaatgaggaagccaggtgatagctcggtccctcctggaatccttcctagagctgtctgggatttcctgttagaaaccacatctttcaaataaggaaaaccaagactcagggagtgacagaccctgccctcagccccgccgggctgccaggaggccccagtcatagcagtgttggttctgacttctgtcttgtcctccaactgtgctctccaagctatgacctgtgcctgaccagggggctggccacaagaggagagaatctggggtcccatccttcctgaccacccctctctcactcccctcattaggaggaactgggcaagcccccttatggggaaagaaaaaaaacggttctgcactggaaaattggccagtggctcccttttcctctcccaccccccaaacctctcagtgccctcaccctcagacaacgacagctgacaacaggcagccagttcaggccagacccctctcacttctgcccctcttcccgccaccgctcccccccaccccgcccccagaagccacaaaaggacagatgcagaggacaggcgccaggcacagataccatctcccttccccaagccagctgcccccaaccctccccctgcccgcaattagtcctctggggcgggagcggggcacagagcagagccctcttgggggaggggaagcccgatccgcacccacccttcctttgcccccctcttccttctgctgctccaatatcaatttcagccagtgacctctccaccaatttgcacatccccactctcccggtccgtttcaccgccagacatcggttccatttcgaccctcactggcggtcattcccaccccctctgctggtcaatttcaccccttttggcggtcaagtgcagtcccccatttcccgggcaatttccccctcccctccttctccctctcccctcccctccccagcagtgtcactcccagctgctccccacctcccgcgctccgcgctcgctgcggccagtctcgggcgtcccggtcagtgtccagctgccgcggcctcggccccggcgactcccgcccccagccccccttccctccgcgggcagcggctccctccctccccagaacagctgaaggtctcagtcacctccgaggggagcgcagggggaggggaggggcgggggacgcggcggaggggaggtgggggagccttgacgctgctgcccgggacgcggcccggggctggtgggaacaggggcgtcctcctgcgcgcccccctccccagcgtcccacctcccggcggcggcggggaaagtctctccgaaagcgtgaagggggattggaggaggtttttatttccctttgtgcgggtggctggggccggatcgaggcggcgggggccgcgggactgggggctccccgctgagccgagaggagcgcgacaaaggatgcgtcccgccggggtcacagtctccgcggcccaactttgcgcgcggcgcccgcgcccctggggagcccgcccgctgcgctgagaacccaggcgtccgggctgggagaggggccgggagcgtccgcaggtggcgctggcccggatctcccgaccccaggaagggatcccggagcttcctggaggcggcgggcggccgtgtcgctccagggaaccgcgctgcccgcggaaactccgcgcgcctccgcggatgcccctcgccctagcccccagcgcgcggggttcggggccctgcgaggtccccccttcccccgcggtgcttcccaagctgggctaaggcgggcttctcttcctccctcctctgtcgcctccttttcctccccctcgttcaccttttccttccctctatccatccagagccccgccaaagggcgcacctgatctttctcatccttccctgctcttcccttcctctccacctcctcctcctccttggggaaaggggcccggagaagggcatgtgggggcccctctgacagtggcccgattggggtgacaggcgcccaaatggccaagtggctacgggactacctgagctttgggggtcggaggccccctccgcagccgcccaccccggactacaccgagagcgacatcctgagggcctaccgcgcgcagaagaacctggacttcgaggacccctatgaggacgcggagagccgcttggagccggaccccgcgggccctggggactccaagaaccccggagatgccaagtatggttctcccaagcaccggctcatcaaggtggaggctgcggatatggccagagccaaggcccttctgggcggccccggggaggaggtgcgtggctgggtggcctggggagactgggtggaggggaggctcaggatgggctctctggatcgtggagagcttattttatgtgtgatcacaggaggggactggggcaccagacagacccttcccagtcctccagacctccacctgcttggggaagtctgttctttttatgtatttatttattttgagacagtctccccctgtcacccaggctggagtgcagtggtgggatctcggctcattgcaacctccacctcctggggttcaagcgattctcctgcctcagcctctccagtagctgagattacaggtgtgtgccaccacacccggctaatttttgtattttcagtagagactggtttcaccatgttagccaggctggactcaaactcctgacctcaggtgatcctcccgcctctgcctcccgaagtgctgggattacaggtgtgagtcactgcgcccggtggatatctgtcccttttcaatgcataatgctggttgtccttctgcctctctgaccaccctgcttggtctccgggtcctcctcctcctccatggtcatcccctgcagtcccccagccccctcccctcagcaccccttcctcttggaacctggtgggatcttcctaaaatagatctgagtgagttgctcccctgctgggcacctaaatatcctcccggtgatgctgcccttcctaccactatgttcccgttttacagaagcgaaactgaggctcgcagaacggtagtgacttggctaaggtctcacggggttctagcttactaggatttgaacccaggccaccgggtgcagtagctcatgcctgtaattccagcactttgggaggtcgaggtgggaggattgcttgagcccaggagttcgagaccagcccgggctaacagagtgagaccttgtctctacaaaaaaaaaatcaaaacattagctagttgtggtggtgcacaccatagtcccagctactcaggaggctgaggcaggaggatcacttgagcctagaaggtcaaagctgcagtgagtcatgattgcgccactgcactccaacctgggtgacagagcaacaccctgtctcaaaaaaaaaaaaaaaaaaaaaaaaaaaggctgggtgtggtggttcacacctgtaatcccagcactttgggaggccaaggcaggtggatcacctgaggtcaggagttccagaccagcctggccaacacagtgaaaccccatctctaccaaaaatgcaaaaattaaccaggcgatgtggcgtgcgcctataatcccagctactcctgaggctgaggcaggagaattgcttgaacccaggaggtggaggttgcagtgagccaacatcgcgccactgcactccagcctgggtgacaagagcgagactctgtctcaataaataaataaataagaagtaagacgttggtaagaagagccagggactcgaggaaaccagtcagccgggatcagactcggcctcttacttaccagctgtgtgtccctaagcaaaacacttactgtctctgtgccttggcttccttgtctggaaaaggggaatggtgtacttattacatgttggtattacaaatcaacacaggtaaatccttgacaatagtgcacggagaagcactgaagtgggcgaaggagggaggcaggtgtctgtgctggggaaatgggatcaagacagagggagacgtgggaagccagccgctgtctgcgagcacttttgggtaacagactccctctccaacccccaaaaagaactcttggagaggccaggcactgtggctcatgcctgtaatcccagcactttgagaggctgaagcgggcggatcatctgaggtcaggagttgaagaccagcctggccaacatggtgaaaccctgtctctactaaaaatgcaaaaattagccaggtttggtggccggcaccagtaattccagctactccagagactgaggcaggagaattgcttgatcccgggagtcggaggttgcagtgagccgagatcacaccactgcactgtagcctgggcaacggagcaagactccatctcaaaataaataaataaataaaactcagctgggcgcggttgctcacgcctgtaatcccagcacgttgggagcccgaggcgggcagatcacgaggtcaggagatcgagaccatcccggctaacacggtgaaaccccatctctacaaaaagttagccaggcatggtggcgggcgcctgtagtcccagctactcgggaggctgaggcaggagaatgacgtgaacccaggaggcagagcttgcagtgagcccagatcccgccactgcactccagcctgggtgacagagcgagactccatctcaaaaaataaaaataaaaataaataaataaataataaaaaaataaaaactcttggagaggtgtcagatggccctgtgggcaggcaagaggtgcagcgtcaattagcagggaagcccctctgagtccttgtcttctccccttccttctctccgcagctggaagccgacactgagtatttagacccctttgatgctcagcctcatcctgcacccccggatgatgggtacatggagccctacgatgcccaatgggtcatgagtggtgagtaggcacggcttgggggaaggtgacagggtcccagatgggagcaggagctgaacagtgtccctggcctcctagaacttcccggcagaggggtgcagctctatgacaccccttatgaggaacaggacccagagacagcagatggacccccttctgggcagaagcctcggcagagccggatgccccaggaagatgaacggccagcagatgagtatgatcagccctgggagtggaagaaagaccacatctccagggcgtttgcaggtgcttctcagacccacactctgacatctgaatgccccatccctgcatttcctcatctggtcatgtctcctgtttcagtttacaaagtagagtccaattacttgtcacttttgtagtttgttaattctcactagagtgtgaatgactgatagtcctaaattctttcttccaagacaacctgcatcttccttggaaacgcaaacactttttagagtggaatggaacctacttatcctgctcagtgtggtgtggggagaggaatatggcttgcttttagaataggatgtgggggtggcaggggcagcatttctttattttattttattttattttatttttctttcgtttttcttccaggcggagtctcactctgtcgcccaggctggagtgcagtggcgtgatctcggctcactgcaagcttcgcctcctgggttcacgccattctcctgcctcagcctcccgagtagctgggactacaggcgcccgccaccacgcccggctaattttttgtatttttagtagagacggggtttcaccatgtcagccaggatggtctcgatcttctgacctcgtgatccacccgcctcggcctcccaaagtgctgggattacaggcaggagccaccgcgcccccgcccggggcagcatttcttaatagctgctagtaaactacaggtgaatttccagctgaattggatgagcttggagaagcctctgaaccttagttttctcttctgtaaaagagataatgataaaatcagttttaaaaaataaaataattgccgggcacggtggctcacgcctgtaatcccagcactttgagaggccgaggcgggtggatcgtttgaggtcaggagttcgagaccagcctgaccaacatggagaaaccccgtcttactaaaaatgcaaaattagtcgggcgtggtggtgcatgccggtaatcccagctactcaggaggctgaggtaggagaattgcttgaacctggaggcggaggttgcggtgagccaagatcgtgccattgcactccagcctgagcagcgagagcaaaactttgtctctaaataaacaaatacataaaataaaataaataaaatttggaccaggaagagttgtgcaaacacgactttgcccccaaagttttatgactgggagggtatttagagcttagtgcctttgtccacctgtctgtagattgggggtgattttctagttttaggacttggccacagtctgggctgaaccccagaaggggtttagggactagggctcctctttggaaacttcgaaccgaccccgtctagccacgccccttgtgctccttgccaccagatttataaatgaccgcacctatttcttaggaaggccaaaaggttgcacctgtggccaatcctgcccctgccttaagcccagcccctgggctgtgataggttgtcccaagctggccctgcctttctaccgagattccattggcttgcccctgccccgccccccaaggtaggctggacttaaccctttcctctctaaatctcctttccagtgcagtttgacagtccagagtgggagaggactccaggctcagccaaggagctccggagacctccgcccagaagcccccagcctgcggagcgtgtggacccagccctgcccctggagaaacagccgtgagtggggaagctgaaggtggaagagccccgttgaacgtatctgtagactccaatgtatcaggcagaagttttttcgtttcccagattagaggaactgggggaacttcgattcattcatccacttatttcttcagctaatctttacgggctccagagcctgctgcgtgccaggcacccagctagacacaaaacaatcttatggggtcccttttcctttggtatcaagttctgggttcacattcctgctctcctctcctggctgtgtagcctggggcaagtcacttaacctctctgagcctcaggttcaaacagaaaaggcaatttccttccttaacttgggtggggcttacagcctcagagccaagagacagaaatcattctcagccagttcttggttcttgggatggaaccaggagatgcaggattttggtgggctcacagctccgtgctggggtggcacgtgagccgggagacgctgactctgtgtccttccagcctgggcgctccttgagggagtgcccaagtccccagaatccagaccatgttgtcacagtcacccctaaaatctcttcggtgggcaatacagaactggctatttaactctgaggccgagggtgtgaagattgttctctttttttctttctcttcctccctccctccctccccgagtcttgctgtgtcgcccaggctggagtgcagtgacgcgacctcggctcactgcaacctccatctcacaggttcaagcgattctcatgcctcagcctccagagtaggtgggactacaggcgtgcaccaccatgcctagctaatttttgtattttcagtagagacagagtttcagtatgttggccaggctggtctggaactcctgacctcatgatccatccacctcggcctcccaaagtgctgggattacaggtgtgagccaccccgcccggcccttcctccttctcttctcttctctttcttttcttttcctttctttttttttttttttttttttgacagagcctcgctcttgtcgcccaggctggagtgcaatgacacaatctcagctcactgcaacctccgcctccctggttcaagcaattctcttgcctcagcctcccaagtagctgggaatacaggctcctggcaccacaccaggctaatttttgtatttttagtagagacagagtttcaccatgttagccaggctggtctcaaactcctgacctcaggtgatgtgcttgccttggcctcccaaagtgttgggatgacagccatgagccaccgcacctggcccgctctttctttttctttctttctttctttctttctttcttttctttctttctttctttctttctttctctctttctttctttctttctttttttctttccttccttccttccttccttccttcctaccttccttccttccttcctttctttctctctttctttctttcttttgagacagggtctcactctgttgcccaggctgaagtgcagtggcacaatcagctcactgtacccctgcactcctgggatcaagcgatcctccagcctcagcctctccatgggaccacaggcacgccatatgtgcttattctcttttcagatttctttcattgtgaacaacagcaaaggctctggtgcttctctgtctttgatatcttgcttgctactgcaaacccctttgtgagcacattaaagcaaaacattaggccaggcacggtggctcacgcctgttatcccagcactttgggaggccggggtgggcagatcatgaggtcaagagatcaagaccatcctggccaacatggtgaaactccatcattagccggacatggtggtgcgtgcctgtaatcccagctactcgggaggctgaggcaggagaatctcttgaacctgcgaggtggaggttgcagtgagctgagatcacgccactgtactccagcctggcgacagagtgagactccatctcaaaataaaacaaaaaaacattaagaaaggggctgggtaaggtggctcatggatgtaatcccagcactttgggaggctgaagcagcggataacctgaggtcaagagtttgagaccagccaggccaacatggtgaaaccccatctctactaaaaatagaaaaaaattagccaggcagccgggcgcagtggctcatgcctgtaatcccagcactttgggaggccgaggtgggcggatcacaaggttagagattgagaccagcctgactaacatggtgaaacccagtctttacgaaaaatgcaaaaaattagctgggcgtggtggcgggtgcctgtagtcccagctacttgggaggctgaggcaggagaatggcgtgaaccggggaggcggagcttacagtgagccgagatcgtgccactgcactccagcctgggtgacagagcgagactctgtctcaaaaaaaaagaaagaaaaagaaaaaaacagaaagggacaggtgggtgaggtacaagatgaagcaccacttttgtgaaagtggttgaagttgacaaggacatgagggaggctgtgaagatcaatgtcaagtgtacgataaccagggctcctcttgaaaaatccaagggtattggccgggcatggtggctcaagcctgtaatcccagtactttgggaggccaaggagggcagataacctgaggttaggagttcgagaccagcctggccaacatggtgaaaccccatctctactaaaaatgcaaaaattagccatgtgtggtgctatgcgcctgtagttccagctactctggaggctgaggcaggagaatcgcttgaacccaggaggcggaggttgtggtgagccaagattgcaccactgcactccaacctggcaacagagcaagactctgtctcaaaaaaaaagaaaaaagaaaactccaagggaattgtccttcttcatttgcccagatgccacaagcccatgcaccagctgtgacccaacagatcccagagtgtgtttttttgtttgtttgtttgtttgttcgtttgttttgagacagagtctcactctgttgcccaggctggagtgcagtggtgcaatctcagctcacaacttccacctccctggttcaagcaatttccctacctcagcctcctgagtagctgggattacaggcacccgccaccacgcccggctaattttttttgtatttttagtagaaacggggtttcaccatgttagggagactggtttcgaactcctgacctcaggcaatccgcccgcgtcagcctcccaaagtgctgggattacagggccccagagtgtgtttgaagggaatggcccttgatgagacatctgtccatactcgctaggtggtttcatggccccctgaacagggcggatgcagagagcctcctgtccctctgcaaggaaggcagctacctagtgcggctcagtgagaccaacccccaggactgctccttgtctctcaggtgagaactcagcctcacagggacgaagggtcacaggattgcgtgagtcacccttttgggttaattcagagggaaggggagggtgtggctcccgcagccatagggaagggcttccaggtcagtgggtgggacttctaggagaaggggtgggagttctggggaggccattagctggttgcaattgagaatgagctcaccatcgctggaggtatacaagaagatggagtggaaggcatcgaggaggtccaggccttgggtaagacaaggaactaggtgcacaagattcctctggactccccttgtccaaaaatggaggtatatcaatttgtgtccatctgaagccaaaatttcagggtgtacctgtaagcgttttaggttgagaccctgtttgtacgcacttccgtccctaaaattctaagtctgtctaattataaaccactcctaagattctgctaggtgtctgagtggaagatctaaaagcacgagattggggctgagcgcggcagctgacgtctgtaatcccagcactttggaaggctgaggaaggtggatcacttgaggtcaggagttcgagaccagcctggccaacatggtgaaaccccttctctcctaaaaatacaaatattagttgggcatagtggtgcatacctgtaattccagctacctcggaggctgaggcaggagaattgcttgaacctgggagacggaagactttcggcgcataccaccgtgcccagctaatttttttttttttttttttttttttgagacggagtctagctctgtcacccaggctggagtgcagtggcgcgatctcggctcactgcaagctctgcctcccgggttcacgccattctcctgcctcagcctcccgagtagctgggactacaggcgcccaccaccacgcccggctaatttttttgtatttttagtagagacggggtttcactgtgttagccaggatggtctcgatctcctgacctcgtgatccgcccgcctcagcctcccaaagtgctgggattacaggtgtgagccgccatgcccggctaatttttgtattcttagtacagacagggtttcgccatgttggccaggctggtctcaaactcctggcctcaagcaatccgcctgactcggcctcccaaagtgctgggattgcaggtgtgggtcactgcacctggcctcttattattattattatttatttatttatttatttattttttgagacagagtctcgctctgtcgcctaggctggagtatagtggcacgatctcggctcactgcaagctccgcctcccgggttcacgccattctcctgcctcagcctcccgagtagctgggactacaggcgcccaccaccacacccagctaattttttgtattttttagtagacacggggtttcaccgtgttagccaggatggtctccatctcctgacctcgtgatccgcctgccttggcctcccaaagtgctgtgattacaggcgtgagccaccgcgcccagcctatttttttattattattattttgagacagagtctcactctgtcacccaggctggggtgcagtggcacaatatcagctcactgcagcctctgcctcccaggttcaagggattctcatgcctcagcctcttgagtagctgggaccacaggcacccgccaccacgcccggctaatttttgtatttttagtggagatggggtttcaccatgttggccaggctggtctcaaactcgtaacctcaagtgatctgcctgactcggcctcccaaagtgctgggattacaggcgtgagccaccgcacccgcctaatttttaaatgttttttggtggagacggggtctcactctgttggccaggctggtctctaacgcctggcctggagtaagcctacagcctcagcttcccatatcactgggattacaggtgtgagcgagtataccagccaccacactgctgtttaccagagactggagacacacgagcacctggcctgggcactgtgggaggtggctttggggatggtgcctttctgggtgggtccgggatgctcaggagtccctttctccctcatcgcccaggagcagccagggcttcctgcatctgaagttcgcgcggacccgtgagaaccaggtggtgctgggccaacacagcgggcccttccccagcgtgcccgagctcgtcctccactacagttcacgcccactgccggtgcagggtgccgagcatctggctctgctgtaccccgtggtcacgcagaccccctgacagtgaccctcggcccccttttgagtcctcgggcccagaatcgtatcccaaagccctcccatggcctagaaaataaataagttattgtttgtcttagtgtcctttctgggctacagagggaagtgggatcgttgactcccagcgggaaagccctaagcagccctggagagggggataatggggtaattgaaaccctggaggaggccaggcacggtggctcacgcctgtaatcccagcactttgggaggttgaggcaggcagatcacctgaggttgggagttcgagaccatcctgaccaacacggagaaaccgcgtctctactaaaaatacaaaattaaccgggcgtggtggcgcatgcgtctaatcccagatactcgggaggctgaggcaggagaatcgtttgaacccaggaggcggagattgcagtgggctgagatcgcaccattacactccagtctggggaacaagagtgaaacgcctccatctcagaacaaacaaacataaaaaaccctcgaggccttgagggccaagcacatccccagcactttgttttggggacagagttgggattggaacctgaatctcccatagggagggaccagaactcagcaagagacagagcgtcgtggagcagattaaaaaccgcactccatagaaaccgacagatacaaagatggagaaactgaggggggccaggctctcgggccagccccgctccctccccccggcagcagtggcttgatctgcagaaaggacatctgtccccatggaaacagcagaagtaggggaggggagctgggcctagctggtgtcacttcaaggtgacaggccaggcaggcaggagacctggggggctggtaaacaccatgaatctcctgacctccccttcttctccccacctccaggcctgcctgggagtgatgccagctgcggggggggtcttccatggcaggggactgtttggaagccagagtaccacttcttcctccttggatttgtccctataaggtgggaggggggctttgagttgccacaaagtcccttggccacagtgggcctctccagccacccctgagagctctgggaccccagatgaccccttaagtctttttggtgcgtgtatgtgacagggtctcactctaccacctaggctggagggcagtgacataattagagctcactgcaacctcaacctccagggctgaagtggtcctcccctctcagcctcccaaatatctgagaccagagacatcagctgcaccatcacgcccggctaaattttgtatttttcgtagagacggagtttcaccatgttggccaggctggtctcgaactcctgacctcaggtgatccgcccacctcggcctcccaaagtgttgggattacaggcgcaagccaccgcgtctggccttgtttttaaattttctgtagaaatggagtcttcttgctctattgcccaggctggtctcaaactcttggcttcaagtgatccttccaccgcagcctcccaaagtgctgggattagaggcgtgagccaccgcacccgatttcttcagatctttttagcactcccaaatcgccacaaacaccagctttgctttttcttcacaagcctttattaggttcttgggggaaagtgggagcgagatccatcattacagaaatgaggacggggtctcaggatggggctgacaggctcccaatcctcctgctttttgttttttttgagacggagtctcactctgtcgcccaggctggagtgcagtggcgcaatctcggctcactgcaacctccgcctcccaggttcaagccaggctggtctcaaacccctgacctcaagtgttccacccgcctcggcttcccaaactgctgggattacaggcgtgagccaccgtgtctggcctcgatccccccttttttgtgtgtacctatgggtggggtcctgttgaggtctcctgggatctctcactcctctcccactttggggaacccttttggcctcggctgctgggtggggcttggtctaggagagaccctgaccatagagacggggtggccgggcctggggctggggcagggtctcgggctggggcagggtcttgacgccaggtgcggctggcggggggccggttgcgggaaggaggttgaataaatgctctggcccctctggtccttcccctctccagagcagtcctcactcttctttggggccccccggggccggtataggacgttgctgtagaatgcatttcctaggatggatgacacagaccaagaggatcacttaagagagtcctgccctctccagctgacctctgggggatctgtctctttttttttttttctgtgagacggagtctcactctgtcgcccaggctggagtgcagtggcgcaatctcggctcactgcaagcttcgcctcctgggttcacgccattctcctgcctcagcctcccaactagctgggactacaggctcccgccaccatgcctggctgattttttgtatttttagtagagacggggtttcactgttagccaggatggtcttgatctcctgacctcgtgatccacccgcctcggcctcccaaagtgctgggattacaggcgtgagccaccgcgcccggcctttttttttttttttttgagacagtcttactctgtcacctgggctggagtgtagcagcggtgcgatctcagctcactgcagtctccacctcccaggttcaagtgattctcctgcctcagtctccctagtagctgggattacaagcccccgctactacgtctggctaattttttgtatttttagcagagatggggtttcaccacgttggccaggctggtctcgaactcctggcctcgtgattcgcccgccgtggcctcccaaaatgctgggattacatgcatgagccactgcacccggccaatttttttttttttttaatttcaaactgtctttttgtttgtttgtttgttttttgagacagggtctctctctgtcacccaggctggagtacagtggggaaactatagctcactgcagcctccgcctcccaggttcaagcaatcctcacacctcagcctcccaagtagctgggaccacaggcgtgtgccaccaagccaggctaatttttttgttgttgttgagatggagtctggctgtgtcgcccaggctggagtgtagtgaggcagtctgggctcactgcaatctctgcctcctgggttccagtgattctcctgcctcaacctcccaagcagctgggactacaggcacaggccaccacgcctgggtaatgtttgtatttttagtagagactgggtttcaccatgtcgcccaggctggtctcaaactcctgacctcaagtgatccacccgcctcagcctcccaaagtgctgggatgacaggcatgagacaccatgcacagcctaatttttaaatttttttttttttgagaccgcgtcttgctctgtcacccaggctagagttcagtggcgcgatcttggctcactgcaacctctgcctcccgggttcaagcgatcctcctgcctcagcctcccaagtagctggtattacaggcgtctgccaccacacctagctaattttttgtatttttagtagatacaaggtttcaccatattgtccaggctgacctcaggtgattcgcccacctcggcctcccaaaatgctgggatgacaggcatgagccaccgcgcccagcaatttgtaatttttttgtagagatgggatcttgctaggttgcacaggctaggggctttgtctctatttctgaaaaacatgagcataggatataggagccaggcttctcctcccttcatccctcctccatccttcccccaggcgggagcacagatgcagtgggtctttgtcaagcagctgcagttcccacctcctccgccctaccctcccttacctgggctgttacctgagtccctttgctggcagctgcggcggccccagaaccaggcaccccacacgatcgcagccacacccatgcttcccacccccagcagcacgaagaggaatcctgggtagggggagaagagatggtctaatcaggaggggaaggggtggtgatgcgggtggaagacgctgggggaggaacacagggcagggctcacctgggaagcttgcgatccggtttctgttctgtgtggggtcatctgcagagaagaaatctatgtcacgggggtgccaggcttctccaccctccaaggacagagctcacttggggggacctaagtgttcctcctcctgccaggctttgtggatttgggcaagtgttcactctgaacctctgtttcttcttctgaaaaatgaggctcagcaggacgcggtggctcaggcctgtaatccgagcactctgggaggctgaggcaggaggatcactcgaggtcaggagttcgagaccagcctggccaacatggtgaaaccccatctctacaaaaaaatataaaaattagccaggcatggtggtggcgcctttaatcccaactactcaggaggctgaggcaggagaatcgcttgaatccaggagggggaggttgcagtgagccgagatcgtgtcactacgctccagcctgggtgacagagcaagactctgcctcaaaaaaaaaaaaaaagaaggccaggcgcagtggctcacacctgtaatcttagcactttgggagaccgaggtaggcggatcacaaggtcaggcgatcgagaccatcctggctaacacagtgaaaccccgtctctactaaaaatacaaaaaattagccggccatggtggtgggcacctgtagtcccagctactcgggaggctgaggcaggagaatggtgtgaacccgggaggcggagcttgcagtgagccaagatcgagccactgcactccagcctgggcgacagagcgagactgtctcgaaaaaaaaaaagaaaaatgaggctcatcgtccctgtcttgttgggtcattgtggaaaaactgccaactgggatttgtcatcatgagccccgccatctttatcctgggatctatcactctccagatcctgtttggttgtttttgtttttgtttgagcctctactccatgccacgcccattttatagacggggaaaccgaggctcagagagcctaagtcacttgcctagggtcccctacccaggcggcagcaggaaccagctttggacaaagccctgtctcacctcagctcggagatcctaacactgaagttccttgagaacttactatgtctcaggccctgtgctaagcattgttttgttgttgttgtttgtttttctggagacagggtcgctctgtgtcacccaggctggagtgcagtggcgtgatcgtagctcactgcagtctccaactcctgggctcaagtgatcctcccgcctcaacctctcaagtagctgggactatgggtatatgccaccatgcctggctaattttagaatttcttgtagagatgaggtcttgctgtgttggccaagctggtctcgacctcctggcctcaaacaatcctcccaccttggcctcccaaagtgctgggatatcaggcgtgagccactgcacttggattatagcaagcactttggctataactgctctaaagtcacccgacctgatgaggaaaaactattcactgtattttgacagcagagggaactggcacagagaggtcaagtcacttgctcaaggtcacacagcaagtaaatgaaacagaggattgaatccaggttgtataatttacaggaaccccagctaaaggctgtgaatgccgcaattaagataaggtccagcaccccaacccccttcttttgcagcctctgaggttggcaggggatccctggggactgccaagctgctgttcaggattggtggggtgtggggaagccagctgtgtggggttggacccgcgcccactccctgctctctcacagctgccaacgcacagcctggcgcctccaccaccccgcctcctctaattgctaattggcccctttgacatcagaggggtgggaagaggtgggtaacacagccataacacacccctcccttgaggcaggcacgtgtcccccgccagcaggctggtcctaccagctggagaggaacaggcatctctaggggctgagagctgggtgcttcattctgccagagggggctggacagaggcccggggcccacaggcacctctcacagagcaggaggcaaagcctgcatccccttgggtttcccgattctgcccaggatgggtccataagtgggggacatggcaaaggggacagtgcatagggtgcacccctgcctggtgcataacgctagatatgtcttggccctctctggttcacctggctcatctgtaaagtgaggcagctggcgttgctgacctggaaagctatctggagggtttcttccaactttgagagtctgtggcttttttttttttttttttttgagacagagtcttgctctgtagcccaggctggagtgcagtggtacaatctgagctcactgcaacctccccctcccggattctcctgcctcagcctcctgagtagctggaattacaggctcacaccaccatgcccagctactttttgtatttttagtagagagggggttttcatcatgttggccaggctggtctcgaacccctgacctcaggtgatccacccaccttggccttccaaagtgctaggattacagggatgagctaccgcgcccagctgatggctttattttatttagagacagggtctcgctctgtcgcccaggctggagtgcagtggtgcactcatagctcactgcagcctccagctcctgggctcaggtgatcctcttgccttagcctcccaaaatgctgggattacaagcatcagccactatgcctggctgatgactttcaattttgtatcctaaaattcttggattatgggccgggcatggtggctcaggcctgtaatcccagtactttgggaggctgaggcaggcagatcacgaggtcaagagatcgagactatcctggccaacatggtgaaacctcgtctctactaaaaatacaaaaattagctgggcgtgctggcacgtgcctgtaatcccagctacttgggaggctgaggcgggagaatcgcttgaacctaggaggcggaggttgcagtgagccgagatcgcgcccctgcactccaaggcctggacgacagagcaagactctgtctcttaaaaaaaaaaaaaaaagtttgatatgaagaatttagagttttttgtttctaggagtttaagactcaaaagtcttaagattctaggatcctccccactgcccctccctctccccgctggctcccgtacctgggtccacaaagagccttgttatgttgccctcagcctcctccaactcaggaatctctacggccgcccagcacacgtacgccccgctgtggttgaggctcacagggtccagctgcagggtgagatggctgggtgcctgccaggagagccgtccctggggcccgcagacccccaggctgaggctgccgttggtgatgtacggttgacacaggatggccccatcctttgtccacttaacacggagccgttcccaggctgtggcctggtccacctggcagaccagggtcgcctgactgccctgcctcacctgcagcaagttgggcccctgctgcacgctcaggcttgaggcttcttgcagggctggaggacagaagaggtagaggcgacctttctgactgtgcgcatgtgaggctgtgtgactcactcccctagtgagcccgcagtctgggtttgaaacctcacttgtctaagacgggtgcagtggctcacgcctgtagtcccagcactttggaagcccgaggtgggaggattgcttgagcccaggagttccagaccagcctgggaacatagcaagacctcatctctacaataaatatttaaaaagtagctgggtatggtggcgtgcaccgtgggcccagctatttaagagactaagtgaagggatcgcttgagcccaggcgttcgaggctgcggtgagctatgattgcaccactgcactccagcctgggtgacaaagcaacaccctgtctctaaaaatttaacataaaaaaaaaaccaaagaacctcactgtctgtatgacctttggaaggtcatgtcttgctgaggctcaacaaccccatctgtaagatgggtataagtcgctcagagcttgtggaattctgagatagtctccagtactcagctacacaaataccgcctagtatatgccaggccctatgctgggtgtggggaacacagacacaggcatgaccaaaacagatgaaaatccctgcccttcagaagctgacaatctagggcaagagagacacaggaagtcgtgaaatgagaactgcagtgggggaaaggaatggcagtggcctcagcagacaccagtgaggtcagggagcatctattccttgagagtaatcagggaaggcctccttgaggtggtgattttttatttttttaattttttttgagttggggtctggctctatagtccaggctggagtgcagtggcaccatcacagctcacggcagccctgaactcctgggctaaagtaatcctcctacctcagcctcccaagtagctgggactacaggcatgtaaccactatgcctggctaatttttttggttttgtagagattggggtctcactgtgttgcccaggctggtgttgaattcctgggctcaagtgatcctccccgctaacgcctcccaaagtgctgggattgtagatgtgagccactgtgaccggcctttttttttttcttaagaccacgccactgcactctagcctgggcaacagagtgagactccatatataagaaaaaaagactccatctcactctgttgcccagtctggagcgcagtggcaccatcaaagttcattgcagcctcagccgcttgggctcatgggctgggtgctgtgactcatgcctgtaatccctgtactttgggaagtcaaggccggtggatcacctgaggtcaggagttcgagacccgtctggccaacgtggtgaaactccatctctactaaaaatacaaaaattagccagtgtggtggcgggctcctggaatcccagctacatgggaggctgaggcaggagaatcacttgaatccgagaggcagaggttgcagtgagctgagaccctgccactgcactctagcttgggcaacagagcgagactccatagcaaagaaaaaaagactccatctcattctattgcccagtctggagtgcagtggcaccttcatagctcactgcaggatcaacctcctgggttcatgggccgggtgcagtggctcacgcctgtaatcccagcactttgggaggccgaggcgggtggatcacctgaggtcaggagttcaagaccagcctggccaacatggtgaaaccctgtctctacttaaactacaaaaattagctgggcatggtggcgggtgcctgtaatcccagctacttgggaggctgaggcaggagaatcgcttgaacccgggaggtggaggttgcagtgacctgagatcgtgccactgcactccagcctgggtgacagagcgaggctctgtctcaaacaaaacaaaacaaggccgggtgcagtggctcacgcctataatcccagcactttgggaggcagaggcgggcggatcacgaggtcaggagatcaagaccatcctgcccaacatggtgaaaccccgtctctactaaaaatacaaaaattagctgggtgtggtggcatgtacccgtagtcccagctactcgggaggctgaggcgggagaatcacttgaacccgggaggcggaggttgcagtgagctgagatcgcgccactgcactccagcctggcgacagagcgagactgtgtctcaaaataaaaaacaaaacaaaacattcctgggctcatgtgatcctcccacctcagcctcccaaattactggtgttacaagtacatgccactgtgctcagcctgaccagggatcttaatggaaaggtataaccagtgtgagaaggaaggtattggggggtaagagcattccaggcagtgcacagcccatgcaaaggccctggggcaggactgtgcctggcgtgttggaggaacagcgaggaggcccgtgtggctggagcagagtgaggacagggagagagggaggaagggttgggcagggcctgtgagccttggggtggtgtggggaggtgaaggaagttaagcagtttatgttttaatgtaagtgtgatggaaaatcagaaagcagggaagaaatagtccaattgaagtttttgtttttgtttttgtttttgttttgagatggggtctcactctgttgcccaggtgggagtgcagtggtgtgatctcggctcattgcaacctctgcctcccaggttcaagtgattcttgtggctcagcctcttgagtagctgggactacaggcactcgctaccacgcccagctaatttttgtatttttggtagagatggggtttcaccaacatggccaggctggtctggaactcctgacctcaagtgatccacctgcctcagtctccaatttaagttttaataaaaagaccttggttgggtgtggtggctcatgcctgttatcccagccctttgggtggccaagactgggtgattgcttgaggccaggagttcaagaccagcctgggcaacatagtgagacccatctctaaaaaacaaaaatgactgggcacggtggctcacgcctgtaatcccagcactttgggaggccaaggtgggtggatcatgaggtcaggagttcgagacccacctggccgagatggcgaaaccccgtctctactaaaaatacaaaaaaaattagccaggcgcagtggcgcgcgcctgcagtcccagctactcgggagcctgaggcaggagaatctcttgaacctgggaggcagaggttgcagtcaaccgagatcgcgtcactgcactctagcctgggtgacagagcaagactccttctcaaaacaaaacaaaacaaacaaacaaaaaaacacaaatgaacaacaaaaaagtgcaagcggctggaatcagaggagagggaaagaggaatggaggttttcgccccaggaaatgtgtgaagggcagcagcctttgtccttaattggaaacacagagggagctgctgccggagtagaaagtctgcttttagctgtgagaagtctgacgtgtctgttagacccccggagaagttgaggttatgtgaagttcctggcatttgagatgcaattgcagaggagggtagagacatgagatctggagaagggtattaggcagctggaacagcaggtgcaaaggctcgaaggccagatccagccttcccattgcggaaacagagaaagaaaagtccccaggctagagcaagagggagggagcaaaggcactgcggagggtggagatgagagaggccaggccaggctggtatgtagggcaaggtttagattgtatcctaggggccctcagaggatccttccttaatcctccagcccccatcacgttctgagtctcggagggagatgggccttatctgacagtagagagactgaagtttagaggggccctgagctggggggcaggcagctggggatgacagcaagagtggggttcagaggggagggaggcccagatactcaccccagatctgcaccaggaggcccagcaccatgcccggggaccccattcctggcccatcacccccctctccccctcccagttgacagacttcctgccacaatctccgcctcccgctgcagaagcagatgcaacacccagggccagacaacagacgtccggtgttccagcctgctgggggctccacttcctgccacctcgtgcctcagtttccccaatgcattttctatctgaaaggcagtgtacggaccaggcaacatggctcatgtctgtaatcccagcactttgggaggccgaggcaggtggatcacctgaggtcaggagttcgagaccagcttggccaacatgatgaaacccctactaatttctactaaaaatacagaaattagctggacatggtgatgggcgcctataatcccagctacttgggaggctgaggcaggagaatggcttaaacccgggaggcggaggttgcagtgagccaagatcacgccactgcactccagcctgggcgacaagagtgaaactccgtctcagaaaaaaagaaaagaaaggcagtgtatgcaagtgagtgggaggaatccacccctgtgagctttctggaaggctctacataaacacatctaggtacaggaagacacagtgcgagagcaggtggctccgtgggggaggggcaggcgacataggcctgagcagtgagttaaatgacagggtccctgcctcaattattttgctcccaaaatgtctttcttttgctgggcgctgtagctcacacctgtaatcccagcactttgtgaggctgaggtgggaggatcacttgagccgagtttaagatcaacctggggtaacacagcgagatccaatctctattaaaaaaaaaaaaaaaaaaaaaaagatacaggctgggcatggtggcccaggcctgtaatcccagcactttgggaggccaaggcgggtggatcacctgaggtcaggagttcaagaccagcctagccaacatggcaaaacccggtctctactaaaaatacaaaaattagctgggcctagtggtgggcgcctgtagtcccagctactcagtggggttgaggcaggagaatcgccagaactggggagatggagattacagggagccgagatcctgccactgcactccagcctgggcgacagagtgagactgtgtctcaaaaaaaaaaaaaaagatacaaaaccaacccagggtgatggtgcatgcctatagtcccagccactcgggaggctgaggcaggagaaccgcttgagcccaggagttggaggctgcagtaagccatgattgcgccccgttactccagcctgggcaacagagtgagtccgtctctaaaaaaaaataataataataatttaaaaaatcttcctttgaggttcagagaaatagatttctgttgataactttgggtcctattacatgacctgcttgggggtcccgtggaggaggttcatgggctctcgagttcctcccagccctgcatccctcacccctgattctgtagtgcattctgggaggaggtggcgaacccacagacctcaatgtctcagacccaactgcagagtgacctcctttctcactcggacctagaaggcctgcatcgtacacagcgttcccctccaccacagggaggttctgcggtggctatgcctgcacctcccctgcagacacgtacacccgcccagcctcccctacccactccttcccctccccagaacattctgaagctccacccttccccccaccgtctgctgagggaccctggatagattagcccccaggtccttccaaagctggacccagacattcttagcttccgcacctgggctggcacggagacttctggaggagctgttggagcctggggctttgtggggtgtataggagttcagttgtgacatagggacaaatggaaagaaggcactggaggctaaacaccctcttgggcaaaagccttagattttcagtaaatgccaggcgggctagacaatttgagtagcaacggataacctgtgtgagtgaacaagtggggaaactgaggcacgggagcattagagatgattctgaggtcccacggcagggccaggggtcgagccccttgtcttctcatccaaggctctctccagctcacatatcaccaccaacaccgcccagtgagccccaggcgctggatgtgagggctctgggcgaggccagcgcggaactacatttcccaggcggccgcggcgggtgcgcctgcgcaatgcgcgcggtgatggagcgctaaccgggggcgcggcggcggcgagggctcggcgggccattggctaccggccgcggcaaaggcagcttggggacccagcgtgcgcggggcccgcgggccgggccggggtgacctgggctgcagccatggaagaacagagggtaggacggggtggggcagggcgggcccgcaggggcgtcgggggcggggaaggggaccaggtgttgccgcagcgcccccactccctccccgcctccaccccagctgctctgcggctgaggccccaccccattcgcgaccccgcccggatctagcccccctaccccagtttgggacgcagcccccccacatcttggcttggggccaggcacgtgccttctacgcccccccaccctgcccagtatcccagtcccatccctgacccccatcccccacgccctccctcctggccgcggaccaggcgtcccggccccccgccccacccctggaagacgccccgccagctccgcagtgcggaccccaccgaccctgccccaggaaaaaggagcaggttggagcctgggtcagagcaagaggctcccgagcgggatcctccctcccagaatcccctgcccttccccaagacctccctgccccctccccgcttacctggcgcccccgcatccctggcccccaggttccacctttgcccaggtaatttctttctccttgcttatctttctcccccaggtaggccccacccctgttccgaggctagcccctatcccaggctatcccacctccctggggtttttccttccaccgagaaccctttccccaggttagcccattttccagcagacatccttctcctctggggttttctgtcctcaggctagcccctcacgccccaccttcaggatgtaggtatcgggttgtagcctttgtgctcaagcacgcctggttcggggccagggtctgtcccttcctgagaggttctctgtgagcctcagtttcctctcctgtaatatggggtagcttagggcgcccagctgctatgggtgaattgtatcagcccggagctttacctcctggctggtgcccaagctcaatagcgtggcagcccccacatctcctctctggatccctggaggggagcgcgggtcagggagcctggccaggctgacgggctcacctgcctgccgtgtgtgtgtgcgcatgtgtgtgcatgtgtgtgcgcacgcgtgtgcatttatgtacgtgtgtgcatgtgtgtgcacgtgtgtacatgtgcgtacacgtgtgtgtacctgtgtgcgcacatgtgtgtgtgcacctgtgtgtgtccacacttctggtggtgcaggaggccctgaggaagatcatcaaaacactggctgtgaagaatgaagaaattcagagctttatctactccctgaaacagatgctgctgaacgtggaggtgaaggcggtggggcagtcctggggaggtaaggggaggggaggaagctggagggtgcagccttaggaactggcccattgctgttgatgcctgtgggaggtctcaggttccctctctgaacacgggctttggccgattctggctgttccgacccaggcgaactcggcgaaggtgcaggaggacctcgaagcagagttccagtccctcttctccctcctggaggagctgaaagaaggcatgcttatgaagataaaacaggaccgtgccagccgtacctacgagctgcaggtgagggctgagggcatcttcctctccccccgcccctcctactcaacagaacgtagctgacctcggcaccttcctccaaaaactgggtgctctcgagtttctgatctctcccctgacccctccatccacctgtacactctctcttttttttttttgagacggaggtctcgctctgtcgcccaggctggagtgcagtggcatgatatcggctcactgcaacctccgcctcctgggttcaagcaattctcctacctcagcctcccaagtagctgggattacaggtacccgccatcatgctgggctaattttcgtatttttagtagagatggggtttcaccgtgtgggccaagctgacctcaggtgatcctcctgcctcagcctcccaaagtgctgggatgacaggcatgagcccccgcgcctggcccatctgtgctctctctgaatcccctctccatcacggcgtccccgagtctggctcagatcttcccctcctgtcttcactcagtgcctccggtttctcagcccttcccactggccccccagatctgaaggtatcacctccactcaaacaccacccatggctcccgtgggctgtcactcagactccaagctggagtcacacaggctgcatccagacctcctgggcaacttcctgacatcccagattcctgtcccagggggaatctagagccctggagctcggatgtggcctaggcatgtgagtttttggtttgttttgttttgagacagagtcttattctgtcacccaggctggagtccagtggcgcaatcatgcctcactgcagcgtccgcctcccaggcttaagcgattctcccatcttagcctcccaagtagctgggaccacaggaaggtgccaccacgcccagctcatttttgtattttttggtggagactggttttcaccatgttgcctagactagtcttgaactcatgggctcaagcgatcctcctgccttggcctcccaaattgctgggattacaggcatgagcctctgtgcctggctcatgtgagttttttttgttttgttttgtttttgagatggagtctctctctgtgacccaggctggatcagttgcacaacctcagctcactgcaacctccgcctcccgggttcaagtgattctcctgcctcagcctcccgagtagctgggattagaggtgcccaccaccacacccagctacttttttctatgtttagtggagacagggtttcactgtgttggccaggctagtcttgaactcctgacctcaggtgatcctcccgcctcagcctcccaaagtgctgggattacaggcctgagccaccacacccggccttacgtgtttttagggaagggattccccagggattctgttctgctccccgagcccagccccatttggtggggcgctcaaggctccaatctccatctctcacctggagttcgagaagggcatggtaccctggattctgaatggggtggggagccctcagggggcctgaggcagtggggtgagttgtcccctcctttggtgcctggtatccacagaaccagctggctgcctgcacgcgggccctggagagctccgaggagcttctggagacagccaaccagactctgcaggccatggacagcgaggactttcctcaggtgggtgcctctgatgctgccaggtaaagaacagtgtgcccagtcacgtttgcatttcaggtgaacaagcacatttttagtgtaagtatagcccacccatgcgatagttggcaaaagtacatactgataccaagaaagtgtccaggccgggcacagtggctacgcctgtaatcccagcactttgggaggctgaggcagtggatcacctgaggtcaggagttcaagactagcctggccaacacggggaaaccccatctctactaaaaatacaaacattagctggatgtggtggtgggcgcctgtaatcccagctacttgggaggctgaggcgggagaatcgcttgaacctgggaggcagaggttgccgtgagctgagattgtgtcactgcattccagactgggcaacagagggagacttcatctcaaaaacaaagaaaaaaagaaaagaaagcattcaggctgggtgcagtggctcatgcctgtaataccagcagtttgggaggccgaggcaggaggattgcttgaggccaggagtttcagaccaacatgggcaacatagtgaaaccccatctctacaaaaaataaaataattggccaggcacaggggctcatgcctgtaatcccagcactttgggaggccaaggcgggcggatcacgaggtcaggagatcaagaccatcctaacacagtgaaaccccgtctctactaaaaaaaaatacaaataaattagccgggcgtggtggcgggcacctgtagttccagctactcgggaggctgaggcaggagaatggcgtgaactcgggaggcggagcttgcagtgagccaagatcgcgccaccgcactccagcctgggcaacagagcgagactccgtcgcaaaaaaaagagattgagaccatcttggctaggacggtgaaaccccgtctctactaaatatacaaaaagttagccgggcatggtggcgggcacctgtagtcccagctactcaggaggctgaggcaggaggatggtgtgaacccgggaggcagagcttgcagtgagcagagatcgcaccactgcactccagcctaggtgacagagcaagactctgtttcaaaaaataaaataaaataaaataattagctgggtgtggtggcacacacctgtggtcccagctactcaagaggctgaagtgggaggattgtttgagctccagagttcaaggttacaatgagccgtgattgttacactgcactctagcctgagggacagagccagaccttgtctcaaaaaaaaagaaaaaaaaagtattcattgttgatctgaaatgcaaatgaataaatacttttttagtataagggtatatatgtgcacactaagaactgcatttgtgtgagtatatcccaaagagtgcatgggacatagtcatgatttatctgaaatgccaatttaactgggcatcctgtagttttattcagtgaatttgccagctgtatgggctgggtgtgggcaggaggttggggtggggatgggagcctgtcttggccatcctctgtcttcagggcacagtccagaagtgcagggacactttggcaaataccttcctcgagaggcctcagtcttcatgtctgtagagtggctttatgatttggtagaaacaaatctttgggccgggcgcagtggctcacgcctgtaatcccagcactttgggaggctgaggcgggccgatcatgaggtcaggagatcaagacaagcctggctaatacagtgaaaccctatctctgctaaaaatacaaaaaattagctgggtgtggtggcgggcgcctgtagtcccagctactcgggaggctgaggcaggagaatggcgtgaacccgggaggcggagcttgcagtgagccgagatcgtgccactgcactccagcctgaacgacagagcaagactccatctcaaaaaaaaaaaaacacaaaaaatgaaacaaatctttgggccaggcacggtggctcatgcctgtaatcccagcactctgggaggctgaggcaggcggatcacctgaggtcaggagtttgagaccagtgtggccaacatggcaaaaccccatctctctaaaaatacaaaaaattggccgggtgtggtggtgggtgcttgtaatcccagctactcaggaggctgaggcagaattgcttgaacccaggaggtggaggttgcagtgagccgagatctctccactgcaatccagcctgggcaacagagcaagactccgtctcaaaaacaaaaaaagaaatctttgaatgttgttctgttcctctctctaggctgccaagcaaatcaaagatgggtaagacactggggtctggcccccaccccactaccctgcccctggtgtgaagacaggggccacctggtgagggtgtctcatctcagagccctggacgggagccctggggaggggccccctcgcgccacggatgaccaggcctggtcccccacgcaacgcctgccacctccttcctgcagagtgaccatggcccctgccttccggctatcattgaaagcgaaggtcagtgacaacatgagtcacctcatggtggacttcgcgcaagagcggcagatgctacaggcactcaagttcctgcctggtgagaggggcacgcactagagggccaggacttccggggaatgacctgggaggctaggaggccctgaaacaggacctggagtatggtggacgacccggtgtctgaattccgcctgggggaggtggagctctgagaattccacgccctgtggggggtggagttctcatggagccccgcccctgggtggagccatgggaagaccccacccactgtgtagtgacatcctgggaaaactctgtacccaggggtggaactgtgagaataccatgtcctgtggggttggttgagtcctcatgaggccccgccctggggtggagccatgagaaggtcaaactcaccaggtgggaaaatcctgtccccaggggtggagccctgagaatagcacgtcctgtgggggtggggtattcatcaagtcccgcccatgggtggagccatcagaaagccccacccaccagggggtgaggtcctgggaaaactctgtccacaggggtggagccctgagaataccatgtcgttgggggagtggagtcctcccgagacctcctccctggatagagccacgagaagggcctgcccaccacatggtagctcctgggaaaaccctgtttccaggggtggagccctgagaaggccacgtccccgaggagaaatggactgagaacccagcctgtctatgatgcagccccaaagaaagccgcatccctcattggcagagattttggaataattctgcctgtaaatgatggaatcccaagaaagctcagccctcccccaacccactgatggaaccttagcgtctccatggccgggcgcggtgactcacgcctggaatcccagcactttgggaggccgaggcgggtggatcacttgaggtcaggagttcaagaccagcctggccaacatggagaaaccctgtctctactaaaaatataaaaaattagccgggccatggtggctcacgactgtaatcccagctactcaggaggctgaggcaggagaatcgcttgaaccagggagtcggaggttgcagtgagccaagatcgtgccactgcactccagcctgggtgacaagagcaagactctgtctctaaaaaaaaaaaagtctccaccctgccaaacatggaacccctttgtggccatgcccccaaaattgtccaacatgtggttgggcagccctgcagcaagccccctgccccctgaaccaggcacagaatcccgaccccctctcctttccgtcttggtcagtgcccagcgcacccgtgatcgacctggctgagtccctggtggcagataactgtgtgaccctggtgtggcgcatgccggatgaggacagcaagattgaccactacgtgctggagtaccggcggaccaacttcgagggcccgccccgcctcaaggaggaccagccctggatggtcatcgagggcatccggcagacagagtacaccctgacaggtaagggcagtgtgtgccagctccgcccagctgtgaacagccacctcttccagcctcccgtctcgccatcagtcactgggggccttggggacgatccccaaagctcatggggtctggaagcagcctggggaggtggatcagaaatatgagacagtggccaggcgcggtggctcatgcctgtaatcccagcactttgggaggctgaagcgggtggatcgcctgaggtcaggagttcaagaccagcgtggccaacatggtgaaaccctatctctactaaaaatacaaaaaaattagccgggcatggtatcgggcacctgtaatcccagctactcaggaggctaaggcgggagaattgcttgaacccggaaggtggagatggcactgagccgagatcgcgctattgcactccagcctgggcaacaaaagcgaaactcatctcaaaaaaacaaaaaataataataatgaatataggccgggcgcggtagctcacgcctgtaatcccagcactttgggaggccgaggcgggccgatcacaaggtcaggagatcgagaccatcctggctaacacggtgaaatactgtatctactaaaaaaatacaaaaaattagccgggcgtggcggtgtgcacctgtagtcccagctgctcaggaggctgaggcaggagaatggcgtgaactcgggaggcggagcttgcagtgagcctagattgcgccactgcactccagcctgggcgacagagcaagactccgtctcaaaaaataaataaataaataaataaataaataaataataataatgaatatatttttccagacatgggatcctgccatttccctaggctggtctccaacccctggcctcaagcagtcctgcctcagcctcccaaatagctgtgtactgtcctcggagcagggaacaaagcagacaataatcttttccctcctagagctggcgttctggattcaccctccaagtatttggggtcctccttggcagttacaagaaattgaaagctggccaggcatggtggctcaagcctgtgatacagcactttgggaggctgaggcaagaggattgcttgaggccaggagctggagaccagcttgggtaacaaagcaagagcccatctataaaaaaaaaaaaaatttaaagttacctgagcatggtggtccccgctaccaagggaggctaaggtgggaggattgtttgagcccaagaattggaggctgcagtgagccatgactgcaccaccgcactccagcctgagcaacagagcgagaccctgtctctactaaacaaagagagaaaaataaagaaaaaaaaaaacaaaacccaaggaatccacccagctggtggaggtagggtctgaagggggaaagcctcctgggccgggcgtggtggctcacacctgtactcccagcactttgggaggcttaggcgggcggatcttgaagtcacgagattgagaccagcctgaccaacatggtgaaaccctgtctctactaaaaatacaaaaattagctgggtgtggtggcgggcgcctgtaatcccagctactcgggaggctgaggcaggagaattgcttgaacccaggaagcagaagttgcagtgagctgagattgcgccactgagctccagcctggttacagagcgagactccgtctcaaaaaaaaaaaaaacaaaaagccatcctggccaggcgtggtggctcacgctgtaatcccagcactttgggaggctgaggtgggtggatcacttgaggtcaggagttcaagaccagcctggccagcatggtaaaaccctgtctctactaaaaatgcaaaaaaattagtggggcatggtggcggatgcctgtagtcccagctacttgggaggctgaggagtgagaatcacttcagcctgggaggcggaggctgcagtgagcagagatcgcgccactgcactccagcttgggcaacagagggagactccgtctcaaaaaaaaaaaagaaaaaaaaagccatcctgatccaggggaatcccggaggggcggggagaggctggctgacgggtttaactatcaccattcactagctgcttttgggctgtaatcagccagctagttatctgtaattagcatacatggttaatcatgagcacgctaactgcagggggaaaagtcatcagcctcaggagctgcaaacagccattggcttatcctttgcttgagaatcaaaataaacacaccccttttatttgttgtaaataggattcctcaaatccctcctccaagtgcccccgccttttggttttgttttcttgtaactttgtattttgaaataattatagatccacaggaagttgccaaaacaactaaaacaaaaagtacagtgaggacccatgtagtcagcataaaacccgggaaatggacacgggtgcagtggactcacattctaccttttttttttttttttgagatggagtctcgctttgtcgcccaggctggagtgcagtggcctgatctcggctcaccgcaacctccgcctcctgggttcaagcaattctcctgtctcagcctccctagtaactgggattacaggcgcccaccaccatgcctggctaatttttgtatttttagtagagatggggtttctccatgttgaccaggctggtctctaactcctgacctcaggtgatccgcctgcctcggcctcccagtgctgggatgacaggcgtgagccaccacgccccgccacattttaccagttttacacgcgctcattcgggtgttccacacagttttctcccatgtgtaaattcatgtcaccaccaacaccacggtcaaagtatagatctcttctgtcactacgaggcttccaggtgctacgctttataaccatggcttcctgcctttgacagacttcctagtgagtgaattcctcagggcagaaagttggattcatggaaagctgtgcaggagtaaggataccgatgaaagcagctgcctatgtggtcgtttgcaatccacctactgttttgttgattgcttggaaagatgggagggtttgggttattttcttctttctttcccttttttcttttttcttttttttgagacagaatctcgctctgtcgcccaagctggagtacagtggcttgatctcggctctctgcaacctctgcctcccaggttcaagcgattctcctgcctcaacctcccaagtagcttggactacaggcactataggcatgcgccccaacgcctggttaatttttttttttttttttttttttttgagacagagtctcactctgttgcccaggctggagtgcagtggtgctatctcggctcactgcaagctccgcctcccgggttcacgccattctcctgcctcagcctcccaagtagctgggactacaggcgcctgccaccacgcctggctaattttttgtatttttagtagagacgggttttcaccgtgttagccaggatggtcttgatctcctgaccttgtgatccgcctccgtcggcctcccaaagtgctgggattacaggcgtgagccaccgtgcctggcctttttttttttttttttttttgagttgcagtctcgctctgtcacccaggctggagtgcaatgatgcgatctttggctcactgcaacttctgcctcctgggttcaagcaattctcctgccccagcctccccagtagctgggattacaggcccccgccaccacacctggctaatttttgtgtttttagtagagacggggtttcaccttattggcgaggctggtctcttggccaggctggtctcgaactcctgacctcaggtgatctgcctgcctcagcctcccaaagtgctgggattataggtgtgagccaccgcgcctagccagttttttgtattttttagtagagacagagtttcaccatgctggccaggctggtctcaaactcctgaccttatgggttcctcctgcctccacctcccagatgtgctgggattacaggcgtgagccaccgcacttggccttttttttttgaaagacaggttcttgctatgtagcacaggctggagtgcagtgatgcaatcatagctcactgcagcttcaacctcttgggctcacatgctcctcctccctcagcctcctgagtaactgggactacaggtgtgcaccaccacacccagctaatttttttggagggggtcagagtttcgctctgtcacccaggctagagtgcagtggtgcgatcttggctcactgcaacctctgcctcccgggttcaagtgattctccttccgcagcctcctgagtagctgggattacaggcgccaccccccgcccccaccaatttttatatttttagtagagatgcggtttcatcatgttggccaggctggtcttgaacgcctgacctcaagtgatctgcccacttcggcctcccaaagtgctgacattacaggcgtaagccaccgcacccagactaattttttattttttattatttatttatttgagacagaatctcaaataaatgtgtcgcccaggctggagtgcagtcgtgcagtacaaatctctgaaacaatcactgtgacagggtcttaaagcatcctgattggtctacgtgggttggaggtggagtcaagtaattcatagcccctcagggagaggagggcaaggaatggtctcaggggtaagatgtttgtttattttttattttttattttttttgagatggagtttcgttcttgttgcccaggctggagtgcaatggcatgatcatggctcactgcaacctccacctcccgggttcaggtgattctcctgcctcagcctcctgagtagctgggattacaggcacacaccaccacgcccggctaattttttgcatttttagtagagacgggggtttcaccatattggtcaggctggtctcgaactcccaacctcagttgatccatgcgcctcggccttccaaagtgctgggattacaggcgtgagccagtgcgcccggctggataagatgtttataaggtggttcttagaatggcgttgggaatcactgtgggacatgacagctttaacccatgactcagagtctcagggaataatacacagtgttgaaatgcctctcttgcctaccaggtctcaagtttgacatgaaatacatgaacttccgtgtgaaggcctgtaacaaggcagttgcaggagagttctctgagccggtgactctggagacaccaggtgactggattccacccttgtcctacccctaactccatggccccttcctcccacagcccccagagaccatgagaatcctcgaagcagggttgccctggctgccaggaagctcaaagctccgtccacagttggcttccttagcctgagtgtctgctataaccctgtttttgtcctttgcttctgaggtttacccagtatatctcgatggtttttgtatacagccacacacactctctctttgccaaaaaatagataagtcctctatagagctggggatgagatttgagtagtgaagactgattccagagcctttcacagtgacaccttcacatgccctgctaggaagtccctctgaaatctagcctaactcccttgtgctgtagcccagccccttttttgggattagtcctccatggaagcacagggtagtgcaattggcttgaaaatgcctccagaggctgggcacagtggctcacgcctgtgatcccaacactctgggaggctgaggcgggcggatcacgaggtcaggagttcgaaaccagcctggccaatatggtgaaaccccgtctctactgaaaatacaaaaattagctgggagtggtagcgtgtgcctgtagtcccagctacttgggaggctgaggcaggagaatcgcttgaacccaggaggcggaggttgcaatgagccgagattgtgccacagcactccagcctgggcgacagagcgagactccatctcaaaacaaaaagaaaagaaaattcctccagacgtgggagggagacttttaggcaacaacccttggccttcgcgcttctggctccatgttctgtcccctctaccctttgccatcttgtctctcctgttgtccttctgcttgtccatctctatatctgtctctctccgaggcttcgtcagtctcttatctctgtcttggactcttatctccttggctctttgattctctgtccctgtcttggtctgtcttggtcactctctgtctctctgtctctctctgtgtctctccgggtttccccatctctgtgactcccacgtctgcccggccccagcgttcatgttccgcctggatgcgtccacatcccaccagaacctgcgggtggatgatctctccgtggagtgggacgctatgggcgggaaggtgcaggatatcaaggctcgcgagaaagatggcaaggggcggacggcgtctcccatcaactccccagccaggtagcctgccccctcccctccctaagtctctggtggaggagatcagtctggacatggacacagagcccagtgtggtcagagttggggtggagaggggacctggggctggtggaacccagagagggaatgaagggagaggaggttttgagtggagttttgatggttaaataggagtttcccagatgacggagggcacaggcatgttctgacataaacatgaggtgctcgatatatagatagagccaaatactgccagagattgacccaacatccacggtggctggggtggactagggtagccttaccgtgggagagagaagtgttgaactgagcctcctgagcctgcccactccctgcccaccacagaggtactccatctcccaagaggatgccctcaggtcgtgggggacgggaccgcttcaccgctgagtcctacacagttctgggtaaggaaggggagaagaaaggggagaggggagttttgggcaggggcctaatggtgggggttgagggagaacctttgcctttggctgcggaaacaggcagccatcagcaaagctgctcccggaataacaggttgttctggcactgcccaaatggaaatatttcgggataagggattgctggggaaagccagaatttatggagtgaaggaaagagactctggaccagacagtgcctgggcaggagcttgggggcaattttctggactccatggagtatctggcacttggggagtagctgggatttagggagtagctgggatttgaggagtagctggaaagaatcattgcctatagagcaactgggtttgtgggggagctgaagccaggcaggaattttgggggatcacctgagggtatgtggaggagccagagaaaacagtctgaagagaagtcaatagtagcataagaatgattggatcctgtgaagaagaagctggagttggtggaggatgggcaagggaggaactggactttaggggaattgctactgttcagaatagagctggagaaagaggctaaaagtatgaggaagtcattgtggtcaggaatatctagagagaaggaagttagggagtagctggggtcatgaggataagctagggcctaaggggaagttatggttctatggggatctaaattttcctgggtgcacctgggattggtgagagttttagggagaagcagaagatatagggagttgtcattggagttgctgagatttgagagagagagagagatcatccttgggaaaggacctggataatttgtggtgtggggagtagctgagatcagggaggagcagacctggagaagacgtgtatagaggttcatcttgtatctggagaggaactgagatataacaaagatcagttgtgatctgggaggggcgagagtatgaggagaagctgaagctcatggaatagctgcattgggtgaaggagtagctgagatggcaagaacctggatctggggcctggggaggatctcaactctggagagaatctggattgtgtacagagctgaagccaaggggtatcccaattcagagggttcctggagagtgtgatggaggtttgaggaacacctggattccaggaggagctgaggcctggagagtatctggcttggggaatgccttgggggaacttctggcctcagcagtagctgaggcctgggagaacctgccttccacgtggagttggggtctggatagaatctggattcagagagcaagaggagggagtcttgagtcctggggagtatctggactctgtcacagcaaggagctagagggagcttctagactctgccagagctgagaactagggggagcatctggaccctgccagagctgggaactagggggagcatctggactcgaggaggacttgaggcctgtgggaacactatgagtcttccaggaacaagggtttgaggatgatctagtttctgggaagaactgaggggtatttggacatggggaggaactgaaagaagtttctatggcttggaggagtctggaaggagtagcttgggcttgtagagaatctgaaaggagtaactgaggcttggggagtatctgggcttaataaatttctggaggaagttgataaagcttaggagtatctggggggaatacccgggaatcaaggaatatctggagggaatagctgggacttgaggagcatctggagggaatagctgcagcctgaggagtatctggggggaaaagctgggactgaggagtatctgggggaaacagctgggactgaggagtatctggaggggaatcgctgggactgaggagtatctgggggaaatagctgggactgaggagtgtctggaggggaatagctgggactgaggagtatccggggaaatagctgggactgaggagtatctggggggaatagctgagactgaggagtatctggaggggaatcgctgggactgaggagtatctgggggaaatagttgggactgaggagtatctggaggggaatagctgggactgaggagtatctggaggggaatcgctgggactggggagtatctggagggaaatagctgagactgaggagtatctggggaaatagctgggactgaggagtacctggaggggaatagctgggactgaggagtatctggggggaatagctgggacctgaggagcatctggagggaataactgcagcctgaggagtatctggggggaatagctgggactgaggagtatctgggggaaacagctgggactgaggagtatctggaggggaatagctgggactgaggagtatctgtggaaatagctgggactgaggagtatctggaggggaatagctgggactgaggagtatctggggaaatagctgggactgaggagtatctggaggggaatagctgggactgaggagtatctgtggaaatagctgggactgaggagtatctggaggggaatagctgggactgaggagtatctggggaaatagctgggactgaggagtatctggggggaatagctgggactgagaagtatctgggggaaatagctggatccccgaggagtatctgggaggaatggctcaagccagagaagtatctggagggactagcagagactgaggcatatctgaagggaattactggggcccaaggagtatctggagggaatagctgggacccaagtatttggagggaataactggagtccaaggagtatctggggggaaatagctggggcccaaggagtatctgaggggaatagctgggaccctgaggagtatctgggaggaataacttggatcccgaggagtatctgggggaaatagctgggtccccaaggagtatctgggagaaatagctgggtcctcaaggattatctgggaagaatagctgggatcctgaggaatatctggggggaatagctgggtccccaagaagtatctggcggggggatagctgggatcccgaggagtatctgggaggaataacttggaccccaaggagtatctgggagaattacctggggcccaaggagtatctgagaggaacagctgggtcctcaaggattatcggggggaatagctgggatcctgaggaatatctggggggaatagctgggtccccaagaagtatctggaggggatagctgggatcccgaggagtatctgggagggataacttggacctcaaggagtatctgggagaattagctggggcccaaggagtatctgagaggaacagctgggtcctcaatgattatctggggggaatagctgggatcctgaggagtatctgggggggcggatagctgggtccccaagaagtatctggaggggatagctgggatcccgaggagtatctgggaggaatagctggagcccaaggagtatctggagggaatagcaggaaccaaggagtatctggagggaatagcaggaaccgaggagtatctggagggaatagcaggaaccgaggagtatctggaggatatagcaggaaccgaggagtatctggagggaatagctgggtccgaaggagtatctggagggaatagctggggcccaaggagtatctggagggaatagctgtggcccaaggtgtatctggagggaatagctggggcccaaggagtatctggagggaatagctggggcccaaggagtatctggggggaatagctgcggcccaaggagtatctggagggaatagctggggcccaaggagtatctggagggaatagctaggaacttgaggcgtatctgaagggaatagctggggttcaaggggtacctgaggggaatagctgggaacctgaggagtatctggggggtacagctaggaacctggggagtgtctctgcagggagcagctgtggtgtaaggagcaccttgggggctggccctttgtggaagggcatctgtggcccagttctatccagttcccctgcccacccctcctgccctgcgccacaggggacacgctgatcgacggcggggagcattactgggaggtgcgctacgagccggacagcaaggcgttcggcgtgggcgtggcctaccgcagcctgggccgcttcgagcaactgggcaagacggccgcctcctggtgcctgcacgtcaacaattggctgcaggtcagcttcacggccaagcacgccaacaaggtcaaggtgctggacgcccccgtgcccgactgcctgggtgtgcactgtgacttccaccaaggtgaccccaagccccagctgccgtctctggctgcccctgcctgagtcccctccgtctgcccccatcccacttctgaccggtcccactgtcactctgccccccgaccccaggcctcctgtccttctacaatgcccgcaccaaacaagtgctgcacactttcaagaccaggttcacacagccgctgctgcctgctttcacggtgagctgccctccgcggcccagggggaggagagggtggtgctgggcgctggggtttgaagctgagcccctcccccctccccccgctgtccctcaggtatggtgtggcagcttccaggtgacgacaggcctgcaggtccccagtgctgtgcgctgcctgcaaaagcgaggcagtgctaccagcagctccaacaccagcctcacctaggcccccaggcacccacccagctggggtgtttttgggggagtcgccgccaagcccaggctgctggagccaggcaccctcctctgtcacttgctgcttggagccttaactccagatgggggggtcaccaagagggagtgggcaccctggcgggccctctccccacctcacctcttaataaaggtcagacactggccaggcgaggccgcggtgctggttctttgggcctgggtgtggcaccgggacctcatccttcccagctgtaaaatgggcttttctcacagaatatggtggtagatttcactgagctgagggtcactgggagtaaatggggccatccgtaggcagacatctgacggacccctcgtcccctaatcccccaagccaagccagacacatgggtcctggggtcagagttttaatcctgggaaaaagaatctggccgctgggccatgccctgggactagcccgctggtccctggtgtgtccgaatcagtgctccagtgcccgcctcttctccagcttcttctgtagctctgccgtcatgtctgccagccctgggggttcaggaccaggagctgcagctggctcagggatccccagtccatgcccaccgccctgacagccacccaggaccagctacagatttgcagggccccgtgcaacaggacagtgtgctcgaaggcattaagaatttcaagacagagacagcagaaccttaaaagacagggcgcttcggagtgtggggacttgtgtgactgtacggtcacacacctgggaagcccgccccgcactgaccccgcagaccccttaccggctgtggggaagagaggctgggctgaactgactggcagcttcctgcccaagccaccattaaagactttgggctctggaagagaagacagatgaggccaggtgtggtggctcacgccggtaatcccagcactttgggaggctgaggtgggtggatcacttgaggtcaggagttcgagaccagcctgggcaacatggtgaaaccccttctctactaaaaatacaaaaattagatggacgtggtggcaggtgcctgtaatcccagctacttgggaggctgaggcaggagaatcacttgaacccggcagacagaggttgcagtgagctgagatcgcgccactgcctgggcaacagagtgagactccatctcaaaacaaaaaacaacaataaagacagatgagctgggtgcggtggctcacgcctgtaatcccagcactttgggaggccgaggtgggcggatcacgaggtcaggagatcaagaccatcctggctaacatggtgaaaccccgtctctactaaaaatacaaaaaaaaaaattagctgggcatggtggcgggcacctgtagtcccagctactggagaggctgaggcaggagaatggcgtgaacccaggaggcggagcttgcagtgagccaaggttgtgccactgcactccagcctgggcgacagagtgagactgtctcaaaaaaaaaaaaaaaagtcagatgagggctgaggctggcctgccatcaggtgagggtgggatatgggggggaccccaacctggcttgggtccaacgggtggctttggaagcttggcaggaggctttggcaacttctttggcttcaggatgactggccaactagaggaagccactgcgtggacaaaagtgtaacgtgtcacatcagctgttaacctgtttccccaacccccagctctcagcagctctgttccccacccaccatcttggttctcatagtcaacagctgggccatctccaatgggggtcacgtagttctcttcctggttcggtagtgggggcagtgggggcagcttgtcctggctagacgcaggtgacagcggcttggggccacctgtgcagggtgcaggacctgatggggaaacgtggtcactgtcaagacccatgtcatacagggacaccttgcaggttggcgggggggtctgtgtgcatgcctggagacaggcatgtgtccctgtgtgtctgtgtgtgtgcccatgtataagtctgtgtctgggccgggcgcggtggctcacgcctgtaatcccagcactttgggaggccagggtgggcggatcacctgaggtcaggggttcaagaccagcctggccaatatggtgaaaccccgtctctactaaaaatacaaaaattagcttggcgtggtggcaggctcctgtaatcgcagctactcggggctgaggcaggagaatcgcttgaacctgggagggagaggttgcagtgagccgagattgcgccactgcactccagcctgggtgacagagcaagactccatctcaaaaaaaaaaaaaagtctttgtgtggcatacacgtgtacactaattgaatctagataagttaaagtgcaacgtttgtacacacacacctgtggtgtgtatacgtgtgtgactgcacgcctgctgaggtggctgctttagtccttgtctacatgagtgcgttttgcccgtgtatctacacgtgtccgagtttgtgccggtgcacggacgtatctgcatttatgtgtacacatgtgattgtggcatgacacaggtgtatctgtgctacatagcatttgtatgtgactggaattggggcacacgtgtatttatgcatgtgtgatctgttgtgcccgcacaagtgtgtgtcaccttctggctaggcaggtggccacagttgcatggatcatgcatgtgtaatgtgtgtgtggatgtggcacttgggggtccttgcatacgcccagaccagggaagaccagacaacccacgctacattcctttctagtgtgttctctgcctcctcttcccactccataaacaggaccgatttccacctctttcccaacacccacccggattctcggtccctgtggggctactgcttgtccgggtgtaccctctgacccctcaatgcccatttctacctaaggagatcctttgggaccatctgcaaagacccactcttctgggaagctttccctgctctgcccccatcttctcccgaactctaggcgcctcccccgagcccaggtttttcctccaccccaaattcaaccctacaggatgagagtgtctgtgtttagctctgtcccaagctgggacccccgccccctcccccacacacacaccctgacggcagggtctgagtcatttctgtccctgcaactttgggaacatcagatgcaggaggtgcagccaccaaactgactgagggggcgtggctgaatgcggggtcctcgatccctcccacctcggcccgcgggaagggggcgtcacctgggcccggagcggagggcgccacccacacattctcgccattctccttatcggcttccacgtagcctggaacagagagggcggcctggaggaagcgcggcggccaggggcggcccggtccgtccgagcgggggcgggagaggtgagcactgggcccccgaactccccgaaggggcacccacctagcaccttctcgtagtcctcgtctaacaggaatggcaccagcgcctttttggtatgcgacacgaaatagttgaccacggcgtccagggaggtgcaagagaactgggggcagatgggggagcggtcaggctgctggagaagggacgcggaccccacaaagtcacttctagggactctggcccaacgctcaccggctgttccacatcgatcacgtacttggggccctcccgcttcaccttgtaatgccggaccacgtgcgtcctgcaccaggagaaagcgagtgagtggctcagcccaggctcccacaccgcccctcagggaaggccccgccccaactccaggctccgcctccaatagaaacaggtccatactggctccgcccccacagaaggccccgccactgactggttccaccccataaaggacctaagccccgttgacctcccggagcactgactgcccgatcccagcactgctcccagcggggaccaggcccgaccgacccacccccacagaagaccccacctctagtcttggcaccacctccagcgagggaccaggccagactgacaacaccctaggaaaggtccgcccctaattctggcaccgcgcctagggagaaccaggccctaaagaccccgccccaggtaggccccgccccctgtaatggctccacccccaggcaccgactctaccttctacatcgccttgcccaaccctggactgggcttgagaatttggcataaggctctgacttcgcccccagggctggctccgcctccatagccctactcaacttccaaaaaggatcacggccatgactcccccccgtagatcctgacgctgcccaaagagcccattcccatccctggatttgacttcatcccctccagtggcccagacctggcccctgcgtacctgacgttccggaggggccgatcctaacctaggagtctgactccacctacagggagtcccagctcctaacccaagacctggctcttcctgcaaaggagtcggcctgggctctaccttcttccctaggcattaaccccatacctggggcaaggccagcctcaggatcccacgaccccggagctctgatcccgcccccagccctccctgcccagctctgactccgcccccatgctcccctgcctagcattgactccacccctcccccagcccgcccaccccagctctgactccgccccaacacgcccagcgtagctctgattccgccaccagtgtactctgctcagctctgactccacccgccccagctcgcccagcccagctctgactcctcccccaatccgcccagcccagctctgactcctcccccaatccgcccacctcagctctgactcctcccccaatccgcccagctcagctctgactccgtccccagacgcccgtctcggctctggctccgtcccctggcctacccactagcgggtcggactccgcccctgcttctgaccacgcccccgcgcccaccctcttcccaccctcctcccacccagggctctccagacgcgcatgcgcacccgttgtgcatctgccgcgtggtgaccgacacgccgtcggcgccgtccccgctgggccgcagcagcaggttcccgcactcggggtagcgctccaggagcagttgtgcctccagccggctcaccttcaggaagcacctgtggcgggccgcgtcacccactcgggaccccggagaccaagtccgctcttctgcacgtaaaccctgcctcctctgagacccagccccatccccatcccctaggcccaggagaccctgccctgctctccagacccaggcccctcccacggagacccagtccggccttccaggctcctagtttttgtggggttttttgttttttttttgagacagggtttcgctcttgttgcccaggctggagtgcaatggcgctatctcggctcaccgcaacctccgcctcccgggttcaagcgattccccttcctcacaggcccggctaatttttgtatttttagtagagacgggatttctccatgttggtcaggctggtctcaaactccctacctcaggtgatccgcccgcctcggcttcccaaggtgctgggattacaggcgtgagccactgcatctggccgggttttttggttttttttttctttagagatggggtctcgctatgttgcccaggatgggtctcgaactgggtaaaagcaatcctcccgcctcgacctcccaaaacgctgagatgacaggcgcgagccaccgcggccagccaggctcttaattctggccccggagatgcagctccaacccctagggagacccagccctgcctcgtaggcacctagagcctcccctggagatcctgtcccgccctccaaacacctagaccttaccctggaggccctgcccgcctccctgatcaccaagaaccgcccacaaagacgatgctccgccccccatccaggccccgcctctagggtcccggttaccctctccgacaaataactcctccccggagacgaagcatcaccttctagacacctagactgaccacccccagaccctgtccctactcctcaggcctaggccccgccactgaagaccttaccagtcctctaggcccctagacccgctcctggagatcctgccctgcctccccagcatgggccataactccccctccccctcccccacccccagccccaaggcagtcctcatgcaaaatccaagacccaactccaggggacccaactcaccgcccaccctcagccacacaaccacctcccgtccccatcctgcagcccctcgggacaggcgggacactcacgagggtgtctccagtgcacggcgcgcctcctctttggccaagacttcagacatcatgtataggtgcccaggaagcagggtcaagtcggtcgggacacggagctgaggggcgatcgagggacagtgactgcacctggccagccgggaatggacggctgtgcccaagtcacagagtggcaaattgaggccagagctcagagcaatgaactctgacaccttagagggcaaagagggcttcgagagggttgcagaggagtgttgcatgagagtagatgctggggccgggcgcggtggctcacgcctgtaatcccagcactttgggaggccgaggcgggcggatcacctaaggtcaggagttcgagaccaacctgggcaacatggcgaaaccccgtttgtactaaaaatacaaaaaattagccgggcgtggtggcagacacctgtaatcccagctactcgggaggctggggcaggagaatcacttgaacctgggaaggcggaggctgcagtaagccaagatcacgccattgcactccagcctgggtgacagagtgagactccgttccccgctccccaaccccaccaaaaaaaaaaaaaaaagtagatgctggaatctagggtctcaaactaaagtctgcaggggccaggcaggtctcaaactcaatggcctgccagggtgaggtaggaaacagggaaatcagagggaaatcaggaaggtagactaaaattcccggttgataaatgatgtcagctaattttttttttttttttttttttgagatggagtttagttctgtcaccaagctggagtgcagtggcgcgatcttggctcactgcaacctccgactcccgggttcaagccattctcctgcctcagcctcccgagtagctggaattacaggctcccgccaccacgcccagctgatttttgtatttttagtagagacagggtttcaccgtgttggccaggatggtcttgatctcctgacctcatgatctgccagcctcggcctcccaaagtgctgggattacaggcgtgagccaccacgcctggccaatgtcagctaatttttaaaaacttagcactctgtggccaggcatggtggctcacatctataatcctatcactttgggaggccaaggagggtggattgcttgagcacggaagttggagaccagcccgggcaacatagtgagaccctgctctacaaaaaaatttttaaattagtcagatgtggtagtgtgtgtctgtatcccagctacttgggaggctgaggcaggaggactgcttgagcctgggagttggaggctgcagtgagctatgatcacaccactgcactccagcctgggcaacagagagagaccttgtctcaaaaaaataaaataagaaatacggttggtcgctgtggctcacgcctgtaatcccagcactttgagtggccaaggcgggcagatgactcaaggtcagttcaagaccagcctggccaacagggtgaaaccccatgtatactaaaaatacaaaaattagccaggcgtggtggcggacgcctgtaatcccagctactcgggaggctgagtcacaagaattgcttgaaccggggaggcagaggttgcagtgagctgagaacgtgccattgcactccagcctgggcaacagagtgagactctgtctcaaaaaaataaaacaaaattttggccgggcccggtggctcacgcctgtaatcccagcactttgggaggctgaggcgggtggatcacgagttcaggagacagagaccatcctggctaacacagtgaaaccccgtctctactaaaatacaaaaaaattagccgggcgtggtggcgggcttctgtaatcccagctactccggaggctgaggcacgagaatggcgtgaacccgggaggcggagcttgcagtgagccgagatcgcaccactgcactccagcctgggcgacagagcgagactccgtctcaaaaaaagaaaaaaagaaagaaagaaaaaggaggctttttgaggagatctggagaatgggagagagggcgcagagagccactactcttacctccaccaccgttaagatgaagcctttccacatttcccgacactccaaggtctctacctggggaacaaaagaaaggaaagaatccaagtcagtgagcctcagtctactcatcaatgaaattggactagggaagagtccctgcttcaaagggccgttttcttttttctttttcttcttttttttttttttttttttttttttgagatggagtctcattcttctgtcgcccaggctagagtacagtggcgcgatctcagctcactgcaacctccacctcccaggttcaagcgattctcctgcctcagcctcctgagtagctgggactacaggcatgcaccacctcgcccagcttttttttttttctcttagacatgagggtctcgctttgttgccaggctggtcttgaactcctgggcccaagctatccttctgccttggcgtcccaaagtgctcagattacaggcatgagccaccatgcctggctgatattatgatttttgatgttattatatcaacatttgaaaaacatagatcaggctggatgcagtggctcactcacgcctgtaatcccagcactttgggaggtcgaggcgggaggatcacttgagcctaggggttcaagaccagactgggtaacatagcgagccccctgtctctacaaaaaaataaaatattagccaggcatagtggcatgtgcttggctgaggtaggaggatcgatcgcttgagcccgggaggtcgaggctgcagtgagctatgatctcactactgcactccagcctgggcgacgagcaagaccctgtctcaaaataaaataataaataaaataaaataatagaaaaacatagatcagttcccagacctctcatgctctaaaccctcccataggccagccaccgtgactcatgcctgtaatcccagcactttgggaggccgaggtgggtggatcacttgaggtcaggagttcgagaccagcctggccaacatggtgaaaccctgtctctaccaaaaatacaaaaattagctgtgcgtggtggcacacgcctgtaatcccagctactcgggaggctgaggcaggagaatcacttaaacctgggaggcagaggttgtagtgagccaagattgcactactgcactccagcctgggtgataagagcgaaactcaaaaaataaaaataaaaaataaaccctcggctggacacggtggctcacgcctataattccagcagtttgggaagccgaggtgggtggatcacctgaggtgaggagttccaggccagcatggccaacatggtgaaaccccatctctactaaagattcaaaaaattagccaggagtggttgcgtgcgcctgtaatcccagctacttgggaggctgaggcaggagaatcacttgaacctgggaggtggaggttgcagtgagccaagatcgtgccattgcactccagcctgggtgacagggcgagacttggtctcaaaaaaaaagtaataaaataaaataaaataaaccctcccatagcacccagctcctttggggtcaagacccaagtcttacccagggcccacagggccctgtactacctgccccttcgtggttggcacaatggagggtaggagcatttgagcatcttctgcaagcaccgcccctctgcacccctccagcaagggacctaccttgaacttgatctcctgatcccggagaatcaggctgaagtgggtgccagggtcacgtgagcttccccagggaatctcatctgtgagtttctcaaatgctcccaagttgagcttctccacgtgctgggggcatagaagcaggggatctgggcaccagttccttggcctccaggccccctggatgatgtagcagccaccttgaccacaccatctacattgtctgcttggtctctgggctcaagggaaggcctgctctggagcctccattcccatccttacctggaagtcccgattgctattgtagaaataaatggtgagaccctgcaggcctgcccagaacttcttgtaatcctagggaccagaagtgcagaaagaagaggtgagctggccaagctgagtgcctttcatgtactcaatcctgtctcggggcctttgcactggttgtgctctctgccccacgctgcccccagatctttattacctcctgccttgagtttctgatcaaatgtaccttctcagggagatcctccccacccatggcccagcttctgggtgtctgttttcgtctgagaaaggaccagacggaacctcgatgtgatgagggattcagagcaacccccgccaatctatagagatgggtgctctaggggtaagttaactaactggtttaatggtatcccattcatctttcatcatccagctacccactagccatctatctatcatccatctgtccatccgcccacccacccattcatccatccacctaccattgacccatccattcacccattcatccatccatccatctgcccaccatccatccaccaatccgtccacccacccacccatccacacatccatccatccagttattcatccacccacccacccattcatccatccacctaccatttacccatccattcatccattcatctatccatccacccactcatccatccgtccatcacccccatccatccatctatccatcatggagccattcatcatccatccatccagtcattcatcaatacctacatcacccaccatccatccagtcatccatccacccacacatccatctgtccacccatccatccatccctccatcatccatccactcatccatccacccactcatccatccatccactcatctatcaatgcatccctccatccatccacctactcatccatccatccacccatccatccatccctccataatccatccatccatccactcaccgtccatcatccatccacccactcatccatccacccactcatccatccacccactcatcaatccatccacccatccatccacctatccatccatccctccatcatccacccaccatctatcatccatccacccactcatccatccacccactcatccatccatccatccatacatccatccactcatctatcaatgcatccctccatcatccatccacctactcatccatccatccctcatccatccatcatccatccatccactcatccctccatcatccatccacctactcatccatccatcatccatccatgcattcatccattcaccatccacccacccacgcatcttcccgttcatccatccatacatccctccatcgtgcatccacctattcatccatctatcattcatccatgcacttgttcatccatccatcatccacccacccacccgtctgcccactcatccatccatccactcccccatccatccatccacccacttgtatatgcactcatccatccacccacacatcctctcagccaccatcaagcccgcatgtattcaccaagcctccactcatccccccatctacccatccacctgtccatccgtagacacaagcacagatacacacatgcatttacctaacatttactgaaggctttttatgtgccagccctgctccaggcactgggactagagcaatacaggattaaacactgtattgcttcattatgtacccacgatgtgctgttgggcaagttatttgagctgtctttgtctgtttccccagctgtaaaatggtgataataatggtgccaactctggaggatctcatgagaattaggtgactttccacatgggaagcaccagggcctgcgttgagtcaagtcctcaacacgtgaactgtgactacagccctaactccctatttcagaagacagaaaactaaggctcaaagattaagtcacttgcataaggcctgggagtaaggaaagtgtggagccgggattagaacctgggtcttcttaattcgggcccatgatcttttttgttttgttttgttttgtttttaagagacagagtcttgctctgtcgcccaggctggagtgcagtggtgcgatctcggctcactgcaacctccacctcccagttcgagccattctcctgcctcagcttctcaagtagctgggattacaagtgcgcaccaccacatccagctaatttttgtattttttagtagaggtggggtttcactatatgttggccagggtgttctcgaactcctgacctcaagtgatccgccggcctcgccctcccaaagtgttgggattacaggcgtgagccactgcacactgccttttttttttttttttttttttgagacagagtctcactctgtcacctaggctgaaatgcggtggcaccatctcagctcactgcaacccccccgccccagttcaagcaattctcctgcctcagcctcccgagtagctgggattacaggtgcacaccaccacgcccagctatttttatttttagtagagatggggtttcatcatgtggccaggctggtcttgaactcctgacctcaagtgatcctcccacctcggcctcccaaagtgttgggttacaggcgtgagccaccacgcccggcccccattatctttcttttcttttttttttctttttgtttttgagagcagtctcgctcttgtcccccaggtttgagtgcaatggcttgatcttgactcactgcaaacttcgcctctcaggctcaaatgattctcctgcctctgcctcccaagtagctgggattaaggcgcctggcaccatacccagctaatttttgtattttttagtagagacgaggtttcaccatattggccaggttggtcttgaactcctgacctcaggtgatccgcctgcctcggcctcccaaagtgctgggattacaggcgtgagccacaagcccggcctcccccattatctttcttaactgcagtgatctactggctctaaagggtttgttggttggggaggatttggatgtatggaggtagaaggaaagtctactccactacaggtaagggaacctcaggggcagaggcggggacatgggcagggaggagctgggggtgtttgttttgatctgtattagaaaatgaggcagtcatggtggctcacacctctaatcccagcagtttgggaggctgagacaggaggatcacttaaggccaggagtttgagaccagcctgggcaacatagcaagaccccatcttttttttttttttgagacggagtcttgctctgttgcccaggctggagtgcagtggcacgatcttggctcactgcaacctctgcctcccaggttcaagtgattctcctgcctcagcctccagagtagctgggatcacaggcacgcaccaccacgcccggctaatctttgtatttttagtagagacggggtttcaccatattggccaggctggtctcaaactcctgacttcaggtgatccacctgcctcagcctccctaagtgctgggattacaggtgtgacccactgcgcctggccagcaagaccccatcttcaaaaaaaaaaaaaaaaggctgggtgcggtggctcatgcctgtaatcccagcatttagagaggccgagacaggtggatcacctgaggtcaagagttcaagaccagccgggccaacaaaatgaaacactgtctttactaaaaatacaaaaattaggtgtggtggtgcgtacctgtaatcccagctactcgggaggctgaggcacgagaatcgcttaatcgtttgaacctgggaggtggaggttgcagtgagccgagatggtgccactgcactgcagcctgggtgacagagtgagactcagtctcaaaaataaataaataaaataaaagccagaagaggcagtgcatgcctgtggtcccagctactcaggaggctggggcgggaggttcacttgagcccaggagtttgaggctacagtgagccatgatcgtgcccctgcactctagcctgggtgacagagcaactctgtctctaacaaaaagaaagaaagaaaatgaatatgcggcattgggaaggagagatagggcctcacggggaacggaggggctgggactttattctgagggagacataagcacacacacacacacacatgcacgcactgtccatggcaactatctgtcctgtggaatgtggcccccgctagctcttactgtcctcacatgtcacctgtcctggccttcgccccagcagctgaggttcacggagtttttcctgggctgggagcgggaggaagctcgggagtcagaggactccccatttcctggaggaagtccctgatcttgtttgtattcaagagagtgaacgagagacaaaagcaaagattgagacaaagagagagggagactgagacagacatcgggagagacagacggggccagggagagagaaagagaaaaagaaaccaaattcaaagacacacggagacagagatagacgcacagagaggcagatggccagaacccaccccagtcccccagcacgtgtcctgccccatccagcacccaccccgcccccccttggcgagtggggagacagggactcagagaggtgccgcagctccccacggtggcccagcagggccagcccccgcctccccaccttacccggtcacagggccccttcttctctagaaagctctcatagtagtgtgaaggcaggacacccttaggcttggggacacggggtggcctcagggcagaggccatgacggagccagggtcttccgcctggcctctccttccagtgggtgccccagctgggccgggaagctgagaaacaggtttcaggggagtttcctgtgtcagcccgtcaactccctcccctgccagggctgggcagaggctgatcccagcaggtccagtgatcctagggaaatccccgcctctccggtgtggaactgagaacagagagaatgtataagtctacttgaatgggagaataatcttcgctatatctgcaaagacagagacatggtctgtctctttatttatttatttatctatttttcctattttgagacagagtttcactctgttgcccaggctggagtaaagtggtatgatcttggctcactgcgacctctgcctcccgggttcaagagactgcgctgcctcccgggttcagagactgagtccaagctcagtctcctgactagcgtggattgcaggtgaccgccaccacgcctggctaatttttgtatttgtagtagagacgaggtttccccatgttggcccaggctggtctcgaactcctgaccccaagttttctgcccgcctcagcctcccaaagtgctgagattacaggcatgagccaccacacctggccctttctcttactttgatggaccctaatgattacattgggcccacctggataatccacgctactctccctattttaaagtcagctgactagcaactttaatttcatctgcaatttttcttttttagacggtgtctcattctgttgtcgatgctggagtgcagtggcacgatcatagttcactgcagccctgacctcccaatctcaagcggtcctcctgcctcagccacccgaagagctgggactataggtgggcaccaccacacccagctaatttattttccttttttaaggatgagttctcactatgttgcctaggctggagtacagtggggcgatcatgactcactgtagcctcgaccttacaggctcaagtgatcctccagcctcagcctccagagtaggtggtactacagttgcatgccaccacacctggctaatttttttttttcttttttttgagacagactctcgctctgtagcccaggctggagtgcagtggcgtgatctcggctcactgcaagctccgcctcccaggttcatgccattcgcctggctcagcctcccaagtagctgggattacaggtgcctgccaccacgcccagctaatttttacacttactagagacaggttcttgctatgttgcccaggctggtctttttttttttttttttttgagacagagtcttactctgtcacccaggctggagtgcagtggagcgatctcggcttactgcaacctctgcctcccaggttcaagcaattctcctgcctcagcctcccgagtagctgggattataggcacgtgccaccatgcccagctaatttgtttgtatttttattttagtagagatggagtttcactgtgttagccaggatggtcttaatctcctgaccttgtgatccacctgcctcgacctcccaaagtgctgggattacaggcataagccaccgtgcccggccctcaggctagtcttgaactcctgggtgcaagtgatcctccagtctaggcctcccaaagtgctggggttacaggtgtgtgccactgtgcctggcgtctatctttaatcttcaaatccctttgccacgtatcctaacgtattcacagattctgggaattagggcgtggatatctttaagagaccattattctgcctaccacagcctgtttaatatggtggacaattgattaattttgaatactgaatcagtcttgggtccctggagtaaaccccacttgtcatggtgtataattcactttatatattgttaaattctactttgtaatattttgttaaggatttttgcacgtcttcatgagggatatggggtgtagcttgctttctttgtaccgtctttatctggttttggtatcagggtcatagttccataaaatgaacagggaagtgtccccttcaattttctggaagagatgatgtgaaattggtgttaattcttctttgaacctttggcagaattccttagtgaaaccatctgggtctggagattgcttttttgggagtttttaaattacaaattcaatttccttagtagttaccagggctagactttgtatacatagcagaacaggtgttctagaaatcacagaaaggccgtgggactgtggcaatgtgttcatccactgaactgtctgataaagttgatagtatcagctatactaagtaaggtcagagagttgatttttgtttcgtttttttgtttgtttgttttttcagacagggttttgctccttttgcccaggctggagtgcagtggcatgatttcggctcactgcaacctccgcctcccgggttcaagcgattttcctgcctcagcctctggagtagctgggattacaggtgcctgccaccacccccggctaatttttttgtttttattagagatggggtttcaccatgttggtcaggctggtcttcagcttctgacctcaagtgatcccaaagtgctgggattacaggcgtgagccactgtgcccagccagggtggttagtttttattgtatttgtctaaggcaatgtggagcgacagaaggatttacagcatgagaggagggcagggtgcggtggctcacgcctgtaatccaaacactttgggagcccaagtgggaagattgcttaaggccaggacttggagaccagcatgggcaacatagtgagatccccttcttttacaagaaaattaaaaattagccaggcatgctggtcacgcctgttgtctcagctactctggaggctgaggcaagaggatcatttgagtccaggaggccaaggctgcagtgagccatgattacaccaatgcactccagcctgggagatagagcaaggccctgtctcgaaaagaaaagaaaataggctgggcgcagtggctcacacctgtaatcccagcactttgggaggctgaggcaggtggatcacctgaggttgggagttcgagaccagcctggcaaacatggtgaaaccccttctctactaaaaatacaaaaattagctgggtgtggtgatgtgcatctgcagtcccagctaattgggaggctgaggcaggagaatcgcttgaacctggtaggcagaggttgtagcgagccaagatcttgccactacactccggcctgggtgacagagcgagactccgtctcaaaaaaaaaaaaaaaaaaaaaaa
